(19) United States
(12) Patent Application Publication
(10) Pub. No.: US 2009/0304590 A1
(43) Pub. Date: Dec. 10, 2009

(54) Therapeutic compositions and methods

(75) Inventors: Davinder Singh Gill, Andover, MA (US); Laird Bloom, Needham, MA (US); Maximillian T. Follettie, Belmont, MA (US); Fionnuala McAleese, Cambridge, MA (US); Sreekumar Kodangattil, Westbrook, CT (US); John Francis DiJoseph, Woodbridge, NJ (US); Nitin K. Damle, Upper Saddle River, NJ (US); Peter R. Baum, Seattle, WA (US); Peter A. Thompson, Bellevue, WA (US); John C. Kumer, Seattle, WA (US); Alan F. Wahl, Mercer Island, WA (US); Paul A. Algate, Issaquah, WA (US); Sateesh Kumar Natarajan, Redmond, WA (US)

Correspondence Address: ROPES & GRAY LLP, PATENT DOCKETING 39/361, 1211 AVENUE OF THE AMERICAS, NEW YORK, NY, 10036-8704, US

(73) Assignees: Wyeth, Madison, NJ (US); Trubion Pharmaceuticals, Inc., Seattle, WA (US)

(21) Appl. No.: 12/290,176

(22) Filed: Oct. 27, 2008

Related U.S. Application Data
(63) Continuation-in-part of application No. 12/156,159, filed on May 29, 2008.
Application No. 12/156,159 is a continuation-in-part of application No. PCT/US2008/006905, filed on May 29, 2008.
(60) Provisional application No. 61/000,511, filed on Oct. 25, 2007.
(60) Provisional application No. 61/062,433, filed on Jan. 24, 2008.
(60) Provisional application No. 60/932,302, filed on May 29, 2007.
(60) Provisional application No. 60/932,302, filed on May 29, 2007.

(51) Int. Cl. A61K 38/00; C07K 2/00; C07K 16/18; C07H 21/00; C12N 5/10; C12P 21/00; A61K 31/704; A61K 31/7068; A61K 33/24; A61K 31/337; A61K 49/00

(52) U.S. Cl. 424/9.1; 530/300; 530/389.1; 530/350; 536/23.1; 514/12; 435/358; 435/369; 435/69.1; 514/34; 514/49; 424/649; 514/449

(57) ABSTRACT

The present application provides novel binding proteins, including human binding proteins that specifically bind to the human ErbB2.

### CROSS REFERENCE TO RELATED APPLICATIONS

[0001] This application claims the benefit of U.S. Provisional Applications 61/000,511, filed Oct. 25, 2007 and 61/062,433, filed Jan. 24, 2008, and of PCT/US2008/006905 and Unites States application Ser. No. 12/156,159, both filed May 29, 2008.

### FIELD OF THE INVENTION

[0002] This invention relates to binding proteins that bind erythroblastic leukemia viral oncogene homolog 2 (ErbB2), in particular, human ErbB2 (also known as HER2), and their use in regulating ErbB2-associated activities. The binding proteins disclosed herein are useful in diagnosing, preventing, and/or treating ErbB2 associated disorders, e.g., hyperproliferative disorders, including cancer, and autoimmune disorders, including arthritis.

### BACKGROUND OF THE INVENTION

[0003] The ErbB family of receptor tyrosine kinases are important mediators of cell growth, differentiation and survival. The receptor family includes four distinct members including epidermal growth factor receptor (EGFR or ErbB1), HER2 (ErbB2 or p185^{neu}), HER3 (ErbB3) and HER4 (ErbB4 or tyro2). Structurally, the ErbB receptors possess an extracellular domain (with four subdomains, I-IV), a single hydrophobic transmembrane domain, and (except for HER3) a highly conserved tyrosine kinase domain. Crystal structures of EGFR reveal a receptor that adopts one of two conformations. In the “closed” conformation, EGFR is not bound by ligand and the extracellular subdomains II and IV remain tightly apposed, preventing inter-receptor interactions. Ligand binding prompts the receptor to adopt an “open” conformation, in which the EGFR receptor is poised to make inter-receptor interactions.

[0004] The ErbB receptors are generally found in various combinations in cells and heterodimerization is thought to increase the diversity of cellular responses to a variety of ErbB ligands. EGFR is bound by at least six different ligands; epidermal growth factor (EGF), transforming growth factor alpha (TGF-α), amphiregulin, heparin binding epidermal growth factor (HB-EGF), betacellulin and epiregulin. A family of heregulin proteins resulting from alternative splicing of a single gene are ligands for ErbB3 and ErbB4. The heregulin family includes alpha, beta and gamma heregulins, neu differentiation factors (NDFs), glial growth factors (GGFs); acetylcholine receptor inducing activity (ARIA); and sensory and motor neuron derived factor (SMDF).

[0005] HER2 was originally identified as the product of the transforming gene from neuroblastomas of chemically treated rats. The activated form of the neu proto-oncogene results from a point mutation (valine to glutamic acid) in the transmembrane region of the encoded protein. Amplification of the human homolog of neu is observed in breast and ovarian cancers and correlates with a poor prognosis. Overexpression of ErbB2 (frequently but not uniformly due to gene amplification) has also been observed in other carcinomas including carcinomas of the stomach, endometrium, salivary gland, lung, kidney, colon, thyroid, pancreas and bladder.

[0006] HER2 has been suggested to be a ligand orphan receptor. Ligand-dependent heterodimerization between HER2 and another HER family member, HER1, HER3 or HER4, activates the HER2 signaling pathway. The intracellular signaling pathway of HER2 is thought to involve ras-MAPK and PI3K pathways, as well as MAPK-independent S6 kinase and phospholipase C-gamma signaling pathways. HER2 signaling also effects proangiogenic factors, vascular endothelial growth factor (VEGF) and interleukin-8 (IL-8), and an antiangiogenic factor, thrombospondin-1 (TSP-1).

[0007] The full-length ErbB2 receptor undergoes proteolytic cleavage releasing its extracellular domain (ECD), which can be detected in cell culture medium and in patient's sera. The truncated ErbB2 receptor (p95ErbB2) that remains after proteolytic cleavage exhibits increased autokinase activity and transforming efficiency compared with the full-length receptor, implicating the ErbB2 ECD as a negative regulator of ErbB2 kinase and oncogenic activity.

[0008] A recombinant humanized version of the murine anti-ErbB2 antibody 4D5 (huMAb4D5-8, rhuMAb HER2 or HERCEPTIN®; U.S. Pat. No. 5,821,337) is clinically active in patients with ErbB2-overexpressing metastatic breast cancers that have received extensive prior anti-cancer therapy (Baselga et al., J. Clin. Oncol. 14:737-744 (1996)). HERCEPTIN® reportedly targets the C-terminal region of domain IV of ErbB2. HERCEPTIN® clinical activity is predominately dependent on antibody dependent cell mediated cytotoxicity (ADCC). Studies have suggested that HERCEPTIN® acts by triggering G1 cell cycle arrest.

[0009] Presently ErbB-directed therapeutics do not meet the current medical needs. ErbB-directed therapeutics have had only modest anti-tumor efficacy and are not as potent as anticipated from preclinical models. In most patients who initially respond to HERCEPTIN®, disease progression is noted within 1 year. In the metastatic setting, a median duration of roughly nine months was reported, at which point it appears that patients frequently become refractory to therapy. Studies have suggested that more complete blockade of the ErbB receptor family would be beneficial. As there are multiple functional domains of HER2, agents targeted to each of the domains could be a potentially valuable therapeutic. Additionally, there are harmful side effects of HERCEPTIN® treatment. Cardiac dysfunction, quantitated as a decrease in left ventricular ejection fraction (LVEF) of 10% from baseline or less than 50% total, was identified in roughly 7.1% of patients receiving HERCEPTIN® for 1 year versus 2.2% in patients randomized to observation in the HERA trial. Rates of severe and symptomatic congestive heart failure (CHF) were also significantly higher in the group randomized to HERCEPTIN®. Potentially, agents targeting a different HER2 epitopes could avoid these side effects. Accordingly, there remains an urgent need for agents targeting HER2.

[0010] The EGFR family of receptor tyrosine kinases are important regulators of cell growth and proliferation. One member of the family, ErbB2, has been implicated in a host of disorders and diseases including many forms of cancer.

[0011] Accordingly, there is an urgent need for therapeutic and diagnostic agents for detecting and treating ErbB2-mediated disorders including proliferative disorders.

### SUMMARY OF THE INVENTION

[0012] The invention relates to novel ErbB2 binding proteins that bind the extracellular domain (ECD) of ErbB2, in particular, human ErbB2. The novel binding protein can be antibody, an antigen-binding fragment of an antibody or a small modular immunopharmaceutical (SMIP). In various embodiments, the binding proteins: bind the ECD in the L1, CR1, L2 or CR2 domain, in some cases in the membrane proximal region of the CR2 domain, such as a membrane proximal region comprising the amino acid sequence shown in the first 12 residues of SEQ ID NO: 671 (i.e., without the EKK). In some embodiments, a HER2 binding protein of the invention is an ErbB2 agonist, increases tyrosine phosphorylation of ErbB2 and/or of AKT, MAP kinase (MAPK), MEK kinase, ERK 1/2, preferentially binds ErbB2 ECD homodimer over monomer or shed ECD, binds HER2 on cells and in some cases internalizes, decreases shedding of ErbB2 ectodomain shedding compared to shedding from cells of the same type without a bound HER2 binding protein of the invention, reduces the amount of cell surface HER2, reduces ErbB2 mediated proliferation of cancer cells, increases apoptosis in cancer cells, increases the number of cells in S phase after treatment with the binding protein, reduces tumor growth in vivo, enhances the effectiveness of some other anti-proliferative or cytotoxic agents or any combination of these properties.

[0013] The invention further relates to nucleic acids encoding the binding proteins or their components, vectors and host cells comprising the nucleic acids and methods of producing the binding proteins by expressing them in the host cells.

[0014] In a further aspect, the invention provides kits and compositions comprising one or more binding proteins of the invention and in some embodiments, further comprising an additional component that is a therapeutic or diagnostic agent, particularly a chemotherapeutic agent.

[0015] The invention also provides methods for producing and identifying binding proteins of the invention and methods for using them, including for treating cancer or other ErbB2 mediated disorders in a subject in need thereof, for reducing proliferation of and/or increasing apoptosis in ErbB2 expressing cells, including cancer cells, for reducing tumor growth and for diagnostic uses, including detecting and/or quantifying the presence of ErbB2 or cells expressing it.

### BRIEF DESCRIPTION OF THE FIGURES

[0016] FIG. 1. Schematic representation of the selection strategy used in the generation of human anti-Her2 scFv binding domains.

[0017] FIG. 2 (A-M). Alignments of the heavy chain amino acid sequences of human anti-Her2 scFvs with the germline human V_{H} gene sequence. CDRs are in bold type.

[0018] FIG. 3 (A-L). Alignments of the light chain amino acid sequences of human anti-Her2 scFvs with the germline human V_{K} or V_{λ} sequence. CDRs are in bold type.

[0019] FIG. 4. (A) Schematic diagram of the protein constructs used for selection and screening of scFvs and SMIPs that bind to the extracellular domain of Her2. (B) scFvs and SMIPs are binned into 4 distinct groups according to their binding phenotype as determined using the reagents in FIG. 4A. (* Herceptin contact sites)

[0020] FIG. 5. ELISA data for scFv binding to Her2. Binding data for phage-expressed scFv binding to Her2-expressing cells is shown on the left side of the table and data for soluble scFv binding to purified Her2 proteins is shown on the right. ELISA data is scored using a range that correlates with binding signal as indicated by −, + etc.

[0021] FIG. 6. Binding of HER2SMIPs (HER067 and HER030), HERCEPTIN® (trastuzumab), and a trastuzumab SMIP (HER018) to (A) HER2 dimer; (B) HER2 monomer; and (C) HER2 shed ectodomain found in SKBR3 supernatant.

[0022] FIG. 7. ELISA and BIACORE® data for HERCEPTIN® (trastuzumab) and SMIPs binding to Her2. Graphs represent binding of HERCEPTIN® (trastuzumab), Her033 or Her030 binding to various Her2 proteins determined by standard ELISA methods. The table represents Kd values for HERCEPTIN® (trastuzumab), Her033, Her030 and Her018 (Herceptin SMIP) binding to various Her2 proteins as detected by BIACORE®.

[0023] FIG. 8 provides a summary of various specific SMIPs, HERCEPTIN® (trastuzumab), and a trastuzumab SMIP (HER018) binding to various HER2 molecules (different sizes and different species, including human, murine, and macaque) as well as binding to several different cancer cell lines.

[0024] FIGS. 9A-9H show cell surface binding of HER2SMIPs (HER067 and HER094), HERCEPTIN® (trastuzumab), and a trastuzumab SMIP (HER018) to cell lines (A) Ramos (Her2⁻/CD20⁺ control); (B) BT474; (C) 22rv1; (D) MDA-MB-175; (E) MDA-MB-361 (ATCC); (F) MDA-MB-453; (G) MDA-MB-361 (JL); and (H) SKBR3.

[0025] FIG. 10 provides a summary of the anti-proliferative activity of HER033 SMIP and HERCEPTIN® (trastuzumab) on several different cancer cell lines.

[0026] FIG. 11. Proliferation of MDA-MB-361 cells following treatment with HER030 or HER033. MDA-MB-361 (ATCC) breast cancer cells were plated in 96-well format and treated with 0-10 ug/ml anti-Her2 or control reagents for 72 hr. Cells were washed, fixed, and stained with DAPI. Stained nuclei were counted using Cellomics High Content assay measuring fluorescence at 360 nM.

[0027] FIG. 12 provides a summary of the anti-proliferative activity of various specific SMIPs, HERCEPTIN® (trastuzumab), and a trastuzumab SMIP (HER018) on several different cancer cell lines.

[0028] FIG. 13. Western blot analysis of effect of Her033 on Her2 receptor phosphorylation (Y1248) following 24 hr treatment of MDA-MB-361 breast cancer cells. Cells were treated in vitro with Her033, HERCEPTIN® (trastuzumab), or a small molecule Her2 kinase inhibitor for 24 hrs either alone or in the presence of heregulin (HRG1 10 ng/ml) activation of Her3. Protein lysates (50 ug/well) were size fractionated by SDS-PAGE, transferred to nitrocellulose and probed with anti-phospho-Her2(Y1248) antibody. Inhibition of the Her2 receptor kinase blocked the endogenous Her2 autophosphorylation at tyrosine 1248 relative to control. Treatment with Herceptin did not significantly modulate receptor phosphorylation whereas treatment with Her033 stimulated Her2 receptor phosphorylation. Western blots were subsequently reprobed with anti-Actin antibody as protein loading control.

[0029] FIG. 14. Her033 increases downstream phosphoprotein signal transduction in MDA-MB-361 and BT474 breast cancer cells. Cells were plated in 96-well format and treated with anti-Her2 reagents or Heregulin for 10 minutes. Cells were stained with either rabbit anti-pAKT, anti-pERK, anti-pS6K, or anti-p38MAPK antibodies and ALEXA594 labeled secondary antibody and cellular fluorescence quantified by high content (Cellomics) analysis. In both breast cancer cell lines, treatment with Her033 SMIP induces phosphorylation of AKT and ERK proteins similar to treatment with the Her3 ligand Heregulin. MDA-MB-361 cells also demonstrate significant activation of p38MAP kinase.

[0030] FIG. 15. Kinetic analysis of Her033 stimulated downstream effector phosphorylation in MDA-MB-361 breast cancer cells. Cells were grown in 96-well format and treated with either anti-Her2 reagents or Her3 ligand Heregulin for 10 min to 24 hr as indicated. Cells were stained with either rabbit anti-pAKT, anti-pERK, anti-pS6K, or anti-p38MAPK antibodies and ALEXA594 labeled secondary antibody and cellular fluorescence quantified by high content (Cellomics) analysis. Her033 treatment induces sustained activation of AKT, ERK and p38MAP kinase phosphorylation in this cell line similar in magnitude to levels following stimulation with 10 ng/ml Heregulin.

[0031] FIGS. 16A and 16B show level of phosphorylation of ErbB2, and ERK1/2 in MDA-MB-361 cells when treated with HER2SMIP HER067, HERCEPTIN® (trastuzumab), and a trastuzumab SMIP (HER018).

[0032] FIG. 17 shows the effect on cell cycle of HER033SMIP, HERCEPTIN® (trastuzumab), and heregulin on the SKBR3 and BT474 cell lines.

[0033] FIG. 18 shows the effect on cell cycle of HER033SMIP, HERCEPTIN® (trastuzumab), and heregulin on the MDA-MB-453 and MDA-MB-361 cell lines.

[0034] FIG. 19. MDA-MB-361 xenograft progression in irradiated nu/nu mice. Female nu/nu mice were exposed to 400 rads of total body irradiation. After three days, they were injected subcutaneously in the dorsal right flank with 1×10⁷ MDA-MB-361 cells in Matrigel. When the tumors had reached a mass of 0.1-0.25 g, animals were dosed with Herceptin, HER033, or vehicle (100 ug/mouse, intraperitoneally) on days 1, 4, 6, 8 and 11 (n=10 mice/treatment group). Tumors were measured, and calculated tumor volumes for individual mice are shown for animals treated with vehicle (A), Herceptin (B), or HER033 (C). Animals developing tumors larger than 2.5 g were sacrificed. The mean tumor volume±SEM are plotted in (D). Means were not calculated for treatment groups in which animals with large tumors had been sacrificed.

[0035] FIG. 20. MDA-MB-361 xenograft progression in Balb/c nude mice. Male Balb/c nude mice were injected subcutaneously in the dorsal right flank with 1×10⁷ MDA-MB-361 cells in Matrigel. When the tumors had reached a mass of 0.1-0.25 g, animals were dosed with HERCEPTIN® (trastuzumab), HER033, or vehicle (100 ug/mouse, intraperitoneally) on days 1, 4, 6, 8 and 11 (n=10 mice/treatment group). Tumors were measured, and calculated tumor volumes for individual mice are shown for animals treated with vehicle (A), HERCEPTIN® (trastuzumab) (B), or HER033 (C). Animals developing tumors larger than 2.5 g were sacrificed. The mean tumor volume±SEM are plotted in (D). Means were not calculated for treatment groups in which animals with large tumors had been sacrificed.

[0036] FIGS. 21 and 22 show the in vivo efficacy of HER2SMIP HER033/HER067 when used to treat SCID-Beige having a tumor xenograft of MDA-MB-361 cells and the in vitro anti-proliferative activity on MDA-MB-361 cells. The top panel of FIG. 21 shows the mean tumor volume in mice treated with HER033SMIP, HERCEPTIN® (trastuzumab), or vehicle (IgG) after 21 days. The bottom panel of FIG. 21 shows a titration of anti-proliferative activity of HER2SMIPs (HER067 and HER094) and trastuzumab SMIP (HER018) on the MDA-MB-361 cells used for xenografting in the mice. FIG. 22 shows the tumor volume of individual mice in each treatment group.

[0037] FIG. 23 (A-M). Alignments of the heavy chain amino acid sequences of human anti-ERBB2 antibodies with the germline human V_{H} gene sequence. CDRs are in bold type.

[0038] FIG. 24 (A-M). Alignments of the light chain amino acid sequences of human anti-ERBB2 antibodies with the germline human V_{K} or V_{λ} sequence. CDRs are in bold type.

[0039] FIGS. 25A and 25B. FIG. 25A is a schematic representation of the “stumpy” strategy used in the generation of human anti-ERBB2 antibodies. FIG. 25B shows the predicted structure of the “stumpy peptide” used for selection. The EKK sequence at C terminus maintains the helical structure predicted from the NMR (Goetz et al., 2001. Biochemistry 40: 6534-6540).

[0040] FIG. 26 (A-K). Alignments of the heavy chain and light chain amino acid sequences of human anti-ERBB2 antibodies with the germline human V_{H} gene sequence. CDRs are in bold type. The human anti-ERBB2 antibodies were selected using the “stumpy” strategy.

[0041] FIG. 27 shows various HER2 soluble protein constructs used to investigate binding of molecules of the invention.

[0042] FIG. 28 provides a summary of various specific SMIPs, HERCEPTIN® (trastuzumab), and a trastuzumab SMIP (HER018) binding to various HER2 molecules (different sizes and different species, including human, murine, and macaque) as well as binding to Her2 monomers and shed extracellular domain.

[0043] FIG. 29 is a graphical representation of different SMIPs binding to various Her2 molecules.

[0044] FIG. 30 graphically depicts the binding of anti-HER2 “stumpy” binders (HER085, HER156 and HER 169) to soluble HER2 constructs.

[0045] FIG. 31 summarizes the cell surface binding of various HER2SMIPs to different cell lines.

[0046] FIG. 32 is a bar graph showing cell staining of JIMT-1 cells with severalanti-HER2SMIPS including “stumpy” binders.

[0047] FIG. 33 graphically depicts staining of various cell lines with HER146, HER156 and HER169.

[0048] FIG. 34 summarizes the cross-reactivity of various HER2SMIPs to Macaca Her2 and Murine Her2.

[0049] FIG. 35 shows BIACORE® data for HERCEPTIN® (trastuzumab) and SMIPs binding to soluble Her2 proteins.

[0050] FIG. 36 shows a titration of anti-proliferative activity of HER2SMIPs (Her147, Her102, Her124, Her067, Her146, Her116, Her094, and Her133), trastuzumab SMIP (HER018) and Herceptin on MDAMB361 (ATCC) cells.

[0051] FIG. 37 shows a titration of anti-proliferative activity of HER2SMIPs (Her146, Her067, Her094, and Her116), trastuzumab SMIP (HER018) and Herceptin on MDAMB361 (JL) cells.

[0052] FIG. 38 is a graph showing decreased proliferation of: MDA_MB-361 cells by anti-HER2SMIPS HER146 and HER116.

[0053] FIG. 39 is a table summarizing the anti-proliferative activity of various specific SMIPs, HERCEPTIN® (trastuzumab), and trastuzumab SMIP (HER018) on several different cancer cell lines.

[0054] FIG. 40 is a graph showing the effect of MEK kinase inhibitor (CL-1040) on anti-HER2SMIP anti-proliferative activity in MDA-MB-361 ATCC breast cancer cells.

[0055] FIG. 41 is a graph showing the effect of ERK1/2 kinase inhibitor (FR180204) on anti-HER2SMIP anti-proliferative activity in MDA-MB-361 ATCC breast cancer cells.

[0056] FIG. 42 is a graph showing the effect of ERK1 or ERK2 knockdown by RNA interference on anti-HER2SMIP anti-proliferative activity in MDA-MB-361 ATCC breast cancer cells.

[0057] FIG. 43 is an image of a Western blot showing the presence of phosphorylated HER2 at 24 hrs and 48 hrs after treatment of MDA-MB-361 ATCC breast cancer cells with HER033SMIP or HER146SMIP.

[0058] FIGS. 44A and 44B show the effect on cell cycle of various SMIPs on the (A) SKBR3 (24 hours) and (B) BT474 (24 hours) cell lines. Samples in bold are statistically higher than the controls. Samples followed by “**” are statistically lower than the controls (student T test with an error rate of 0.05).

[0059] FIGS. 45A-E show the effect on cell cycle of various SMIPs (A) MDA-MB-453 (24 hours), (B) MDA-MB-361 (JL) (24 hours), (C) MDA-MB-361 (JL) (48 hours), (D) MDA-MB-361 (ATCC) (24 hours), (E), and MDA-MB-361 (ATCC) (48 hours). Samples in bold are statistically higher than the controls. Samples followed by “**” are statistically lower than the controls (student T test with an error rate of 0.05).

[0060] FIG. 46 is a graph of the mean tumor volume over time after treatment in vivo with anti-HER2SMIPs HER146 and HER116 in SCID-Beige mice having an MDA-MB-361 (JL) cells tumor xenograft. HERCEPTIN® (trastuzumab) and vehicle (IgG) are positive and negative controls, respectively

[0061] FIG. 47 presents results in SCID-Beige mice having a tumor xenograft of MDA-MB-361 (JL) cells following treatment with HER146SMIP and HER116SMIP. The left panel shows the survival of mice treated with HER146SMIP, HER116SMIP, HERCEPTIN® (trastuzumab), or vehicle (IgG) over a timecourse of 60 days. The right panel shows tumor free progression of mice treated with HER146SMIP, HER116SMIP, HERCEPTIN® (trastuzumab), or vehicle (IgG) over a timecourse of 60 days. The chart at the bottom demonstrates the mean survival time of mice used in the study.

[0062] FIGS. 48A-D are a set of graphs of MDA-MB-361 xenograft tumor size in Balb/C nude mice after treatment with anti-HER2SMIP HER146. HERCEPTIN® (trastuzumab) and vehicle (IgG) are positive and negative controls, respectively. (A) summary of data from 10 mice in each treatment group; (B) data for individual mice in vehicle (negative control) group; (C) data for individual mice in HER146 treatment group; (D) data for individual mice in HERCEPTIN® (positive control) group.

[0063] FIGS. 49A-D are a set of graphs of MDA-MB-361 xenograft tumor size in irradiated nu/nu mice after treatment with anti-HER2SMIP HER146. HERCEPTIN® (trastuzumab) and vehicle (IgG) are positive and negative controls, respectively. (A) summary of data from 10 mice in each treatment group; (B) data for individual mice in vehicle (negative control) group; (C) data for individual mice in HER146 treatment group; (D) data for individual mice in HERCEPTIN® (positive control) group.

[0064] FIG. 50 presents data from two independent experiments investigating the effect of anti-HER2SMIPS of the invention on the shedding of HER2 ectodomain and on HER2 cell surface expression. (A) and (B) present the relative effect of various anti-HER2 SMIPS on ECD shedding as detected by ELISA. Panels (C) and (D) presents the relative effect of various anti-HER2SMIPS on HER2 expression.

[0065] FIG. 51 presents data from the anti-HER2SMIP cross-blocking experiments. (A) HERCEPTIN®; (B) HER018; (C) HER067; (D) HER094; (E) HER102; (F) HER116; (G) HER146; (H) RITUXAN® and anti-CD20 SMIP (negative control).

[0066] FIG. 52 is a chart summarizing the cross-blocking results.

[0067] FIG. 53 provide photographs depicting the internalization of anti-HER2 SMIP (panels A and B) and cell surface HER2 (panel C).

[0068] FIG. 54 is a graph depicting Fc dependent cellular cytoxicity (FcDCC) of various anti-HER2SMIPS in MDA-MB-361-JL and SKBR3 cells.

[0069] FIG. 55 is a graph depicting complement-dependent cytotoxicity (CDC) (complement-dependent cytotoxicity) in SKBR3 cells.

[0070] FIG. 56 presents data from ELISA testing of SMIP binding to Her2-SIIS after storage of the SMIP in plasma at various temperatures and durations. (A) Her067; (B) Her146.

[0071] FIG. 57 depict different possible ratios of SMIP/receptor complexes with their predicted mass.

[0072] FIG. 58 shows the masses of SMIP/receptor complexes observed following SEC-RI-MALLS analysis.

[0073] FIGS. 59A-D provide a series of dose response curves of different cells pre-treated with 5-fold dilution series of HER146 and then treated with corresponding 5-fold dilution series of different chemotherapeutic agents, or combinations thereof, and charts of the dilution series times of incubation used. (A) MDA-MB-453 cells with HER146 and Cisplatin or Taxol; (B) MDA-MB-453 cells with HER146 and Doxorubicin; (C) MDA-MB-361-JL cells with Cisplatin or Taxol; (D) MDA-MB-361-JLcells with HER146 and Doxorubicin or Gemcitabine.

[0074] FIG. 60 is an immunoblot with short (left) or long (right) exposures showing Her2 immunoprecipitated from Ramos or SKBR3 cell lysates by Herceptin, 3B5, HER156, or HER169.

[0075] FIG. 61 is two immunoblots in color and a black-and-white exposure of the color blot on the right, showing Her2 immunoprecipitated from Ramos, JIMT-1, or MDA-MB-361 ATCC cell lysates by human IgG, 3B5, HER116, HER156, or HER169.

### DETAILED DESCRIPTION OF THE INVENTION

### I. Definitions

[0076] In order that the present invention may be more readily understood, certain terms are first defined. Additional definitions are set forth throughout the detailed description. The present invention provides novel binding proteins that, specifically bind the extra cellular domain (ECD) of ErbB2, especially human ErbB2. In some embodiments, the binding protein is an antibody or an antigen binding fragment of such antibody that specifically binds the ECD. In other embodiments, the binding protein is a small modular immunopharmaceutical (SMIP).

[0077] The term “antibody” refers to an intact four-chain molecule having 2 heavy chains and 2 light chains, each heavy chain and light chain having a variable domain and a constant domain, or an antigen-binding fragment thereof, and encompasses any antigen-binding domain. In various embodiments, an antibody of the invention may be polyclonal, monoclonal, monospecific, polyspecific, bi-specific, humanized, human, chimeric, synthetic, recombinant, hybrid, mutated, grafted (including CDR grafted), or an in vitro generated antibody.

[0078] The term “antigen-binding fragment” of an antibody that specifically binds the ECD of ErbB2 refers to a portion or portions of the antibody that specifically binds to the ECD. An antigen-binding fragment may comprise all or a portion of an antibody light chain variable region (V_{L}) and/or all or a portion of an antibody heavy chain variable region (V_{H}) so long as the portion or portions are antigen-binding. However, it does not have to comprise both. Fd fragments, for example, have two V_{H} regions and often retain some antigen-binding function of the intact antigen-binding domain. Examples of antigen-binding fragments of an antibody include (1) a Fab fragment, a monovalent fragment having the V_{L}, V_{H}, C_{L} and C_{H}1 domains; (2) a F(ab′)₂ fragment, a bivalent fragment having two Fab fragments linked by a disulfide bridge at the hinge region; (3) a Fd fragment having the two V_{H} and C_{H}1 domains; (4) a Fv fragment having the V_{L} and V_{H} domains of a single arm of an antibody, (5) a dAb fragment (Ward et al., (1989) Nature 341:544-546), that has a V_{H} domain; (6) an isolated complementarity determining region (CDR), and (7) a single chain Fv (scFv). Although the two domains of the Fv fragment, V_{L} and V_{H}, are coded for by separate genes, they can be joined, using recombinant methods, by a synthetic linker that enables them to be made as a single protein chain in which the V_{L} and V_{H} regions pair to form monovalent molecules (known as single chain Fv (scFv); see e.g., Bird et al. (1988) Science 242:423-426; and Huston et al. (1988) Proc. Natl. Acad. Sci. USA 85:5879-5883). These antibody fragments are obtained using conventional techniques known to those with skill in the art, and the fragments are evaluated for function in the same manner as are intact antibodies.

[0079] The term “effective amount” refers to a dosage or amount that is sufficient to alter ErbB2 activity, to ameliorate clinical symptoms or achieve a desired biological outcome, e.g., decreased cell growth or proliferation, decreased heterodimerization with another member of the EGF family decreased homodimerization, decrease tumor growth rate or tumor size, increased cell death etc.

[0080] The term “human antibody” includes antibodies having variable and constant region sequences corresponding substantially to human germline immunoglobulin sequences known in the art, including, for example, those described by Kabat et al. (See Kabat, et al. (1991) Sequences of Proteins of Immunological Interest, Fifth Edition, U.S. Department of Health and Human Services, NIH Publication No. 91-3242). The amino acid sequences of a human antibody, when aligned with germline immunoglobulin sequences, most closely align with human immunoglobulin sequences. The human antibodies of the invention may include amino acid residues not encoded by human germline immunoglobulin sequences (e.g., mutations introduced by random or site-specific mutagenesis in vitro or by somatic mutation in vivo). Such non-germline residues may occur in a framework region, a CDR, for example in the CDR3, or in the constant region. A human antibody can have one or more residues, such as any number from 1-15, including all of the integers between 1 and 15, or more, replaced with an amino acid residue that is not encoded by the human germline immunoglobulin sequence. CDRs are as defined by Kabat or in Chothia C, Lesk A M, Canonical structures for the hypervariable regions of immunoglobulins, J Mol Biol. 1987 Aug. 20; 196(4):901-17.

[0081] The phrase “inhibit” or “antagonize” an ErbB2/HER2 activity refers to a reduction, inhibition, or otherwise diminution of at least one activity of ErbB2 due to binding an anti-ErbB2 antibody or antigen binding portion, wherein the reduction is relative to the activity of ErbB2 in the absence of the same antibody or antigen-binding portion. The activity can be measured using any technique known in the art, including, for example, as described in the Examples. Activation of the Her2 receptor tyrosine kinase can be measured by the degree of phosphorylation of key tyrosine residues in the intracellular domain. For example, Tyr1248 is a known site of autophosphorylation and thus is a direct measure of Her2 receptor kinase activity. Typically the degree of phosphorylation can be determined by Western blot analysis probing with anti-phopho-Her2 specific antibodies (eg. Tyr1248, Tyr1139, Tyr1112, Tyr877, Tyr1221/1222). Alternatively, cells can be permeabilized and probed with fluorescently labeled phospho-Her2 antibodies and measured either by flow cytometry or high content (Cellomics) analysis. Additionally, the Her2 receptor can be immunoprecipitated, digested with trypsin protease and the degree of phosphorylation at specific sites within the individual Her2 peptides determined by standard Mass Spec techniques. Inhibition or antagonism does not necessarily indicate a total elimination of the ErbB2 polypeptide biological activity. In some embodiments, the reduction in activity may be about 10%, 20%, 30%, 40%, 50%, 60%, 70%, 75%, 80%, 85%, 90%, 95% or more, including 100% reduction, i.e., elimination of the activity.

[0082] The term “ErbB2” refers to erythroblastic leukemia viral oncogene homolog 2. In the case of human ErbB2, it also is known as c-erb-B2 or HER2/neu. In some embodiments the ErbB2 may comprise: (1) an amino acid sequence of a naturally occurring mammalian ErbB2 polypeptide (full length or mature form) or a fragment thereof, or a fragment thereof; (2) an amino acid sequence substantially identical to, e.g., at least 85%, 90%, 95%, 96%, 97%, 98%, 99% identical to said amino acid sequence or a fragment thereof; (3) an amino acid sequence that is encoded by a naturally occurring mammalian ErbB2 nucleotide sequence or a fragment thereof, or (4) a nucleotide sequence that hybridizes to the foregoing nucleotide sequence under stringent conditions, e.g., highly stringent conditions.

[0083] HER2 or c-erb-B2 encodes a transmembrane receptor protein of 185 kDa, which is structurally related to the epidermal growth factor receptor1. HER2 protein overexpression is observed in 25%-30% of primary breast cancers and is associated with decreased overall survival and a lowered response to chemotherapy and hormonal therapy, which can continue throughout the course of the disease and drives aggressive tumor growth.

[0084] The term “ErbB2 activity” refers to at least one cellular process initiated or interrupted as a result of ErbB2 binding to a receptor complex comprising ErbB2 and an ErbB receptor family member including ErbB1 (EGFR), ErbB2, ErbB3, ErbB4 or comprising an ErbB ligand such as but not limited to EGF, TGF-alpha, amphiregulin, betacellulin, heparin-binding EGF-like growth factor, GP30 on the cell. ErbB2 activity can be determined using any suitable assay methods, for example, protein overexpression can be determined using immunohistochemistry (1HC) and may also be inferred when HER2 gene amplification is identified using fluorescence in situ hybridization (FISH).

[0085] As used herein, “in vitro generated antibody” refers to an antibody where all or part of the variable region (e.g., at least one CDR) is generated in a non-immune cell selection (e.g., an in vitro phage display, protein chip or any other method in which candidate sequences can be tested for their ability to bind to an antigen). This term excludes sequences generated by genomic rearrangement in an immune cell.

[0086] The term “isolated” refers to a molecule that is substantially free of its natural environment. For instance, an isolated protein is substantially free of cellular material or other proteins from the cell or tissue source from which it was derived. The term also refers to preparations where the isolated protein is sufficiently pure for pharmaceutical compositions; or at least 70-80% (w/w) pure; or at least 80-90% (w/w) pure; or at least 90-95% pure; or at least 95%, 96%, 97%, 98%, 99%, or 100% (w/w) pure.

[0087] The phrase “percent identical” or “percent identity” refers to the similarity between at least two different sequences. This percent identity can be determined by standard alignment algorithms, for example, the Basic Local Alignment Tool (BLAST) described by Altshul et al. ((1990) J. Mol. Biol., 215: 403-410); the algorithm of Needleman et al. ((1970) J. Mol. Biol., 48: 444-453); or the algorithm of Meyers et al. ((1988) Comput. Appl. Biosci., 4: 11-17). A set of parameters may be the Blosum 62 scoring matrix with a gap penalty of 12, a gap extend penalty of 4, and a frameshift gap penalty of 5. The percent identity between two amino acid or nucleotide sequences can also be determined using the algorithm of E. Meyers and W. Miller ((1989) CABIOS, 4:11-17) that has been incorporated into the ALIGN program (version 2.0), using a PAM120 weight residue table, a gap length penalty of 12 and a gap penalty of 4. The percent identity is usually calculated by comparing sequences of similar length.

[0088] The terms “specific binding” or “specifically binds” refer to forming a complex that is relatively stable under physiologic conditions. Specific binding is characterized by a high affinity and a low to moderate capacity as distinguished from nonspecific binding which usually has a low affinity with a moderate to high capacity. Typically, binding is considered specific when the association constant K_{A} is higher than 10⁶ M⁻¹. The appropriate binding conditions, such as concentration of antibodies, ionic strength of the solution, temperature, time allowed for binding, concentration of a blocking agent (e.g., serum albumin, milk casein), etc., may be optimized by a skilled artisan using routine techniques. An antibody is said to specifically bind an antigen when the K_{D} is ≦1 mM, preferably ≦100 nM.

[0089] As used herein, the term “stringent” describes conditions for hybridization and washing. Stringent conditions are known to those skilled in the art and can be found in Current Protocols in Molecular Biology, John Wiley & Sons, N.Y. (1989), 6.3.1-6.3.6. Aqueous and nonaqueous methods are described in that reference and either can be used. One example of stringent hybridization conditions is hybridization in 6× sodium chloride/sodium citrate (SSC) at about 45° C., followed by at least one wash in 0.2×SSC, 0.1% SDS at 50° C. A second example of stringent hybridization conditions is hybridization in 6×SSC at about 45° C., followed by at least one wash in 0.2×SSC, 0.1% SDS at 55° C. Another example of stringent hybridization conditions is hybridization in 6×SSC at about 45° C., followed by at least one wash in 0.2×SSC, 0.1% SDS at 60° C. A further example of stringent hybridization conditions is hybridization in 6×SSC at about 45° C., followed by at least one wash in 0.2×SSC, 0.1% SDS at 65° C. High stringent conditions include hybridization in 0.5M sodium phosphate, 7% SDS at 65° C., followed by at least one wash at 0.2×SSC, 1% SDS at 65° C.

[0090] The phrase “substantially as set out,” “substantially identical” or “substantially homologous” means that the relevant amino acid or nucleotide sequence (e.g., CDR(s), V_{H}, or V_{L} domain) will be identical to or have insubstantial differences (through conserved amino acid substitutions) in comparison to the sequences that are set out. Insubstantial differences include minor amino acid changes, such as 1 or 2 substitutions in a 5 amino acid sequence of a specified region. In the case of antibodies, the second antibody has the same specificity and has at least 50% of the affinity of the first antibody.

[0091] Sequences substantially identical or homologous (e.g., at least about 85% sequence identity) to the sequences disclosed herein are also part of this application. In some embodiment, the sequence identity can be about 85%, 90%, 95%, 96%, 97%, 98%, 99% or higher. Alternatively, substantial identity or homology exists when the nucleic acid segments will hybridize under selective hybridization conditions (e.g., highly stringent hybridization conditions), to the complement of the strand. The nucleic acids may be present in whole cells, in a cell lysate, or in a partially purified or substantially pure form.

[0092] The term “therapeutic agent” is a substance that treats or assists in treating a medical disorder. Therapeutic agents may include, but are not limited to, anti-proliferative agents, anti-cancer agents including chemotherapeutics, anti-virals, anti-infectives, immune modulators, and the like that modulate immune cells or immune responses in a manner that complements the ErbB2 activity of an anti-ErbB2 binding protein of the invention. Non-limiting examples and uses of therapeutic agents are described herein.

[0093] As used herein, a “therapeutically effective amount” of an anti-ErbB2 binding protein refers to an amount of an binding protein that is effective, upon single or multiple dose administration to a subject (such as a human patient) at treating, preventing, curing, delaying, reducing the severity of, and/or ameliorating at least one symptom of a disorder or recurring disorder, or prolonging the survival of the subject beyond that expected in the absence of such treatment.

[0094] The term “treatment” refers to a therapeutic or preventative measure. The treatment may be administered to a subject having a medical disorder or who ultimately may acquire the disorder, in order to prevent, cure, delay, reduce the severity of, and/or ameliorate one or more symptoms of a disorder or recurring disorder, or in order to prolong the survival of a subject beyond that expected in the absence of such treatment.

### II. Anti-ErbB2 Binding Proteins

[0095] In a first aspect, the invention provides novel ErbB2/HER2, particularly human ErbB2/HER2, ErbB2/HER2 binding proteins that bind in the extra-cellular domain (ECD). In various embodiments, the binding proteins of the invention bind in the LR1, CR1, LR2 or CR2 domain of the ECD, including a membrane proximal region of CR2 comprising the amino acid sequence in the first twelve residues of SEQ ID NO: 671 (i.e., without the EKK). Unlike HERCEPTIN®, in some embodiments the binding proteins of the invention preferentially bind ErbB2 nomodimers over monomers or shed ECD. In some embodiments, the binding proteins of the invention bind ECD homodimers substantially more than monomers. In some cases, the binding protein has no appreciable or significant binding to ECD monomers or to shed ECD.

[0096] In some embodiments, the novel binding proteins are ErbB2 agonists and increase tyrosine phosphorylation of ErbB2 and at the same time, have anti-proliferative activity and pro-apoptotic activity. In some embodiments, the binding protein increases kinase activity in a HER-2 expressing cell, including but not limited to increasing kinase activity of MEK, MAPK, ERK1, ERK2 or a combination thereof.

[0097] The anti-ErbB2/HER2 binding proteins of the invention can be obtained by any of numerous methods known to those skilled in the art. For example, antibodies can be produced using recombinant DNA methods (U.S. Pat. No. 4,816,567). Monoclonal antibodies may be produced by generation of hybridomas (see e.g., Kohler and Milstein (1975) Nature, 256: 495-499) in accordance with known methods. Hybridomas formed in this manner are then screened using standard methods, such as enzyme-linked immunosorbent assay (ELISA) and surface plasmon resonance (BIACORE™) analysis, to identify one or more hybridomas that produce an antibody that specifically binds with a specified antigen. Any form of the specified antigen may be used as the immunogen, e.g., recombinant antigen, naturally occurring forms, any variants or fragments thereof, as well as antigenic peptide thereof.

[0098] One exemplary method of making antibodies includes screening protein expression libraries, e.g., phage or ribosome display libraries. Phage display is described, for example, in Ladner et al., U.S. Pat. No. 5,223,409; Smith (1985) Science 228:1315-1317; Clackson et al. (1991) Nature, 352: 624-628; Marks et al. (1991) J. Mol. Biol., 222: 581-597WO 92/18619; WO 91/17271; WO 92/20791; WO 92/15679; WO 93/01288; WO 92/01047; WO 92/09690; and WO 90/02809.

[0099] In addition to the use of display libraries, the specified antigen can be used to immunize a non-human animal, e.g., a rodent, e.g., a mouse, hamster, or rat. In one embodiment, the non-human animal includes at least a part of a human immunoglobulin gene. For example, it is possible to engineer mouse strains deficient in mouse antibody production with large fragments of the human Ig loci. Using the hybridoma technology, antigen-specific monoclonal antibodies derived from the genes with the desired specificity may be produced and selected. See, e.g., XENOMOUSE™, Green et al. (1994) Nature Genetics 7:13-21, US 2003-0070185, WO 96/34096, published Oct. 31, 1996, and PCT Application No. PCT/US96/05928, filed Apr. 29, 1996.

[0100] The subunit structures, e.g., a C_{H}, V_{H}, C_{L}, V_{L}, CDR, FR, and three-dimensional configurations of different classes of immunoglobulins are well known in the art. For a review of the antibody structure, see Antibodies: A Laboratory Manual, Cold Spring Harbor Laboratory, eds. Harlow et al., 1988. One of skill in the art will recognize that a complete 4-chain immunoglobulin comprises active portions, e.g., a portion of the V_{H} or V_{L} domain or a CDR that binds to the antigen, i.e., an antigen-binding fragment, or, e.g., the portion of the C_{H} subunit that binds to and/or activates, e.g., an Fc receptor and/or complement. CDRs typically refer to regions that are hypervariable in sequence and/or form structurally defined loops, for example, Kabat CDRs are based on sequence variability, as described in Sequences of Proteins of Immunological Interest, US Department of Health and Human Services (1991), eds. Kabat et al, or alternatively, to the location of the hypervariable structural loops as described by Chothia. See, e.g., Chothia, D. et al. (1992) J. Mol. Biol. 227:799-817; and Tomlinson et al. (1995) EMBO J. 14:4628-4638. Still another standard is the AbM definition used by Oxford Molecular's AbM antibody modelling software, which defines the contact hypervariable regions based on crystal structure. See, generally, e.g., Protein Sequence and Structure Analysis of Antibody Variable Domains. In: Antibody Engineering Lab Manual (Ed.: Duebel, S, and Kontermann, R., Springer-Verlag, Heidelberg). Embodiments described with respect to Kabat CDRs can alternatively be implemented using similar described relationships with respect to Chothia hypervariable loops or to the AbM-defined loops.

[0101] In another embodiment, a monoclonal antibody is obtained from the non-human animal, and then modified, e.g., humanized, deimmunized, chimeric, may be produced using recombinant DNA techniques known in the art. A variety of approaches for making chimeric antibodies have been described. See e.g., Morrison et al., Proc. Natl. Acad. Sci. U.S.A. 81:6851, 1985; Takeda et al., Nature 314:452, 1985, Cabilly et al., U.S. Pat. No. 4,816,567; Boss et al., U.S. Pat. No. 4,816,397; Tanaguchi et al., European Patent Publication EP171496; European Patent Publication 0173494, United Kingdom Patent GB 2177096B. Humanized antibodies may also be produced, for example, using transgenic mice that express human heavy and light chain genes, but are incapable of expressing the endogenous mouse immunoglobulin heavy and light chain genes. Winter describes an exemplary CDR-grafting method that may be used to prepare the humanized antibodies described herein (U.S. Pat. No. 5,225,539). All of the CDRs of a particular human antibody may be replaced with at least a portion of a non-human CDR, or only some of the CDRs may be replaced with non-human CDRs. It is only necessary to replace the number of CDRs required for binding of the humanized antibody to a predetermined antigen.

[0102] Humanized antibodies or fragments thereof can be generated by replacing sequences of the Fv variable domain that are not directly involved in antigen binding with equivalent sequences from human Fv variable domains. Exemplary methods for generating humanized antibodies or fragments thereof are provided by Morrison (1985) Science 229:1202-1207; by Oi et al. (1986) BioTechniques 4:214; and by U.S. Pat. No. 5,585,089; U.S. Pat. No. 5,693,761; U.S. Pat. No. 5,693,762; U.S. Pat. No. 5,859,205; and U.S. Pat. No. 6,407,213. Those methods include isolating, manipulating, and expressing the nucleic acid sequences that encode all or part of immunoglobulin Fv variable domains from at least one of a heavy or light chain. Such nucleic acids may be obtained from a hybridoma producing an antibody against a predetermined target, as described above, as well as from other sources. The recombinant DNA encoding the humanized antibody molecule can then be cloned into an appropriate expression vector.

[0103] In certain embodiments, a humanized antibody is optimized by the introduction of conservative substitutions, consensus sequence substitutions, germline substitutions and/or backmutations. Such altered immunoglobulin molecules can be made by any of several techniques known in the art, (e.g., Teng et al., Proc. Natl. Acad. Sci. U.S.A., 80: 7308-7312, 1983; Kozbor et al., Immunology Today, 4: 7279, 1983; Olsson et al., Meth. Enzymol., 92: 3-16, 1982), and may be made according to the teachings of PCT Publication WO92/06193 or EP 0239400).

[0104] An antibody or fragment thereof may also be modified by specific deletion of human T cell epitopes or “deimmunization” by the methods disclosed in WO 98/52976 and WO 00/34317. Briefly, the heavy and light chain variable domains of an antibody can be analyzed for peptides that bind to MHC Class II; these peptides represent potential T-cell epitopes (as defined in WO 98/52976 and WO 00/34317). For detection of potential T-cell epitopes, a computer modeling approach termed “peptide threading” can be applied, and in addition a database of human MHC class 11 binding peptides can be searched for motifs present in the V_{H} and V_{L} sequences, as described in WO 98/52976 and WO 00/34317. These motifs bind to any of the 18 major MHC class II DR allotypes, and thus constitute potential T cell epitopes. Potential T-cell epitopes detected can be eliminated by substituting small numbers of amino acid residues in the variable domains, or preferably, by single amino acid substitutions. Typically, conservative substitutions are made. Often, but not exclusively, an amino acid common to a position in human germline antibody sequences may be used. Human germline sequences, e.g., are disclosed in Tomlinson, et al. (1992) J. Mol. Biol. 227:776-798; Cook, G. P. et al. (1995) Immunol. Today Vol. 16 (5): 237-242; Chothia, D. et al. (1992) J. Mol. Biol. 227:799-817; and Tomlinson et al. (1995) EMBO J. 14:4628-4638. The V BASE directory provides a comprehensive directory of human immunoglobulin variable region sequences (compiled by Tomlinson, I. A. et al. MRC Centre for Protein Engineering, Cambridge, UK). These sequences can be used as a source of human sequence, e.g., for framework regions and CDRs. Consensus human framework regions can also be used, e.g., as described in U.S. Pat. No. 6,300,064.

[0105] In certain embodiments, an antibody can contain an altered immunoglobulin constant or Fc region. For example, an antibody produced in accordance with the teachings herein may bind more strongly or with more specificity to effector molecules such as complement and/or Fc receptors, which can control several immune functions of the antibody such as effector cell activity, lysis, complement-mediated activity, antibody clearance, and antibody half-life. Typical Fc receptors that bind to an Fc region of an antibody (e.g., an IgG antibody) include, but are not limited to, receptors of the FcγRI, FcγRII, and FcγRIII and FcRn subclasses, including allelic variants and alternatively spliced forms of these receptors. Fc receptors are reviewed in Ravetch and Kinet, Annu. Rev. Immunol 9:457-92, 1991; Capel et al., Immunomethods 4:25-34, 1994; and de Haas et al., J. Lab. Clin. Med. 126:330-41, 1995).

[0106] For additional antibody production techniques, see Antibodies: A Laboratory Manual, eds. Harlow et al., Cold Spring Harbor Laboratory, 1988. The present invention is not necessarily limited to any particular source, method of production, or other special characteristics of an antibody.

[0107] In some embodiments, an anti-ErbB2 antibody of the invention may be a V_{HH} molecule. V_{HH} molecules (or nanobodies), as known to the skilled artisan, are heavy chain variable domains derived from immunoglobulins naturally devoid of light chains, such as those derived from Camelidae as described in WO9404678, incorporated herein by reference. Such a V_{HH} molecule can be derived from antibodies raised in Camelidae species, for example in camel, llama, dromedary, alpaca and guanaco and is sometomes called a camelid or camelized variable domain. See e.g., Muyldermans., J. Biotechnology (2001) 74(4):277-302, incorporated herein by reference. Other species besides Camelidae may produce heavy chain antibodies naturally devoid of light chain. V_{HH} molecules are about 10 times smaller than IgG molecules. They are single polypeptides in which the CDR3 is longer than a conventional antibody, the VH:VL interface residues are different, and extra cysteines are generally present. These molecules tend to be very stable, resisting extreme pH and temperature conditions. Moreover, they are resistant to the action of proteases which is not the case for conventional antibodies. Furthermore, in vitro expression of V_{HH}s produces high yield, properly folded functional V_{HH}s. In addition, antibodies generated in Camelids will recognize epitopes other than those recognized by antibodies generated in vitro through the use of antibody libraries or via immunization of mammals other than Camelids (see WO 9749805, that is incorporated herein by reference). In additional embodiments, an anti-ErbB2 antibodies or binding fragments of the invention may include single domain antibodies such as immunoglobulin new antigen receptors (IgNARs), which are a unique group of antibody isotypes found in the serum of sharks (Greenberg et al., Nature 374: 168-173 (1995); Nuttall et al., Mol. Immunol., 38: 313-326. (2001)). These are bivalent molecules, targeting antigen through a single immunoglobulin variable domain (˜13 kDa) displaying two complementarity determining region (CDR) loops (Roux et al., Proc. Natl. Acad. Sci., 95: 11804-11809 (1998)) and having unusually long and structurally complex CDR3s, which display a high degree of variability (Greenberg et al., 1995).

[0108] Antibodies, also known as immunoglobulins, are typically tetrameric glycosylated proteins composed of two light (L) chains of approximately 25 kDa each and two heavy (H) chains of approximately 50 kDa each. Two types of light chain, termed lambda and kappa, may be found in antibodies. Depending on the amino acid sequence of the constant domain of heavy chains, immunoglobulins can be assigned to five major classes: A, D, E, G, and M, and several of these may be further divided into subclasses (isotypes), e.g., IgG1, IgG2, IgG3, IgG4, IgA1, and IgA2. Each light chain includes an N terminal variable (V) domain (V_{L}) and a constant (C) domain (C_{L}). Each heavy chain includes an N terminal V domain (V_{H}), three or four C domains (C_{H}s), and a hinge region collectively referred to as the constant region of the heavy chain. The C_{H} domain most proximal to V_{H} is designated as C_{H}1. The V_{H} and V_{L} domains consist of four regions of relatively conserved sequences called framework regions (FR1, FR2, FR3, and FR4), that form a scaffold for three regions of hypervariable sequences also referred to as complementarity determining regions CDRs. CDRs are referred to as CDR1, CDR2, and CDR3. Accordingly, CDR constituents on the heavy chain may be referred to as HCDR1, HCDR2, and HCDR3, while CDR constituents on the light chain are referred to as LCDR1, LCDR2, and LCDR3. CDR3 is typically the greatest source of molecular diversity within the antibody-binding site.

[0109] The anti-ErbB2 binding proteins of the invention include complete 4-chain antibodies and antigen-binding fragments of complete antibodies. An antigen-binding fragment (also referred to as an antigen-binding portion) includes but is not limited to Fab, Fv and ScFv molecules. The Fab fragment (Fragment antigen-binding) consists of V_{H}-C_{H}1 and V_{L}-C_{L} domains covalently linked by a disulfide bond between the constant regions. The Fᵥ fragment is smaller and consists of V_{H} and V_{L} domains non-covalently linked. To overcome the tendency of non-covalently linked domains to dissociate, a single chain Fᵥ fragment (scFᵥ) can be constructed. The scFᵥ contains a flexible polypeptide that links (1) the C-terminus of V_{H} to the N-terminus of V_{L}, or (2) the C-terminus of V_{L} to the N-terminus of V_{H}. Repeating units of (Gly₄Ser)_often 3 or 4 repeats may be used as a linker, but other linkers are known in the art.

[0110] A “bispecific” or “bifunctional antibody” is an artificial hybrid antibody having two different heavy/light chain pairs and two different binding sites. Bispecific antibodies can be produced by a variety of methods including fusion of hybridomas or linking of Fab′ fragments. See, e.g., Songsivilai & Lachmann, Clin. Exp. Immunol. 79:315-321 (1990); Kostelny et al., J. Immunol. 148, 1547-1553 (1992). In one embodiment, the bispecific antibody comprises a first binding domain polypeptide, such as a Fab′ fragment, linked via an immunoglobulin constant region to a second binding domain polypeptide.

[0111] In some embodiments, an anti-ErbB2 binding protein of the invention is a Small Modular ImmunoPharmaceuticals (SMIP™). SMIPs and their uses and applications are disclosed in, e.g., U.S. Published Patent Application. Nos. 2003/0118592, 2003/0133939, 2004/0058445, 2005/0136049, 2005/0175614, 2005/0180970, 2005/0186216, 2005/0202012, 2005/0202023, 2005/0202028, 2005/0202534, and 2005/0238646, and related patent family members thereof, all of which are hereby incorporated by reference herein in their entireties.

[0112] A SMIP™ typically refers to a binding domain-immunoglobulin fusion protein that includes a binding domain polypeptide that is fused or otherwise connected to an immunoglobulin hinge or hinge-acting region polypeptide, which in turn is fused or otherwise connected to a region comprising one or more native or engineered constant regions from an immunoglobulin heavy chain, other than C_{H}1, for example, the C_{H}2 and C_{H}3 regions of IgG and IgA, or the C_{H}3 and C_{H}4 regions of IgE (see e.g., U.S. 2005/0136049 by Ledbetter, J. et al., which is incorporated by reference, for a more complete description). The binding domain-immunoglobulin fusion protein can further include a region that includes a native or engineered immunoglobulin heavy chain C_{H}2 constant region polypeptide (or C_{H}3 in the case of a construct derived in whole or in part from IgE) that is fused or otherwise connected to the hinge region polypeptide and a native or engineered immunoglobulin heavy chain C_{H}3 constant region polypeptide (or C_{H}4 in the case of a construct derived in whole or in part from IgE) that is fused or otherwise connected to the C_{H}2 constant region polypeptide (or C_{H}3 in the case of a construct derived in whole or in part from IgE). Typically, such binding domain-immunoglobulin fusion proteins are capable of at least one immunological activity selected from the group consisting of antibody dependent cell-mediated cytotoxicity, complement fixation, and/or binding to a target, for example, a target antigen, such as human ErbB2.

[0113] The binding domain of a SMIP of the invention may contain a complete V_{H} and a complete V_{L} joined by linker antigen-binding portions of a V_{H} and/or V_{L} and may V2 or be linked in either orientation, i.e., V_{H}-linker-V_{L} or V_{L}-linker-V_{H}. Any suitable linker can be used in a SMIP of the invention and will be known to those of skill in the art. Exemplary linkers may be found, for example in WO 2007/146968 Tables 5 and 10-12 of which are incorporated by reference in their entirety. Likewise, any immunoglobulin hinge sequence or hinge-acting sequence may be used in a SMIP of the invention.

[0114] In some SMIP embodiments at least one of the immunoglobulin heavy chain constant region polypeptides (i.e., CH2, CH3 or CH4) is from a human immunoglobulin heavy chain. In various embodiments, the immunoglobulin heavy chain constant region polypeptides are of an isotype selected from human IgG and human IgA. In certain further embodiments of the above described SMIP, the linker polypeptide comprises at least one polypeptide having as an amino acid sequence (Gly₄, Ser) and in certain other embodiments the linker polypeptide comprises at least three repeats of said polypeptide. In certain embodiments the immunoglobulin hinge region polypeptide comprises a human IgA hinge region polypeptide.

[0115] An immunoglobulin hinge region polypeptide, as discussed above, includes any hinge peptide or polypeptide that occurs naturally, as an artificial peptide or as the result of genetic engineering and that is situated in an immunoglobulin heavy chain polypeptide between the amino acid residues responsible for forming intrachain immunoglobulin-domain disulfide bonds in CH1 and CH2 regions; hinge region polypeptides for use in the present invention may also include a mutated hinge region polypeptide. Accordingly, an immunoglobulin hinge region polypeptide may be derived from, or may be a portion or fragment of (i.e., one or more amino acids in peptide linkage, typically 5-65 amino acids, preferably 10-50, more preferably 15-35, still more preferably 18-32, still more preferably 20-30, still more preferably 21, 22, 23, 24, 25, 26, 27, 28 or 29 amino acids) an immunoglobulin polypeptide chain region classically regarded as having hinge function, as described above. But, a hinge region polypeptide for use in the instant invention need not be so restricted and may include amino acids situated (according to structural criteria for assigning a particular residue to a particular domain that may vary, as known in the art) in an adjoining immunoglobulin domain such as a CH1 domain or a CH2 domain, or in the case of certain artificially engineered immunoglobulin constructs, an immunoglobulin variable region domain.

[0116] Wild-type immunoglobulin hinge region polypeptides include any naturally occurring hinge region that is located between the constant region domains, CH1 and CH2, of an immunoglobulin. The wild-type immunoglobulin hinge region polypeptide is preferably a human immunoglobulin hinge region polypeptide, preferably comprising a hinge region from a human IgG immunoglobulin, and more preferably, a hinge region polypeptide from a human IgG1 isotype. As is known to the art, despite the tremendous overall diversity in immunoglobulin amino acid sequences, immunoglobulin primary structure exhibits a high degree of sequence conservation in particular portions of immunoglobulin polypeptide chains, notably with regard to the occurrence of cysteine residues which, by virtue of their sulfyhydryl groups, offer the potential for disulfide bond formation with other available sulfydryl groups. Accordingly, in the context of the present invention wild-type immunoglobulin hinge region polypeptides may be regarded as those that feature one or more highly conserved (e.g., prevalent in a population in a statistically significant manner) cysteine residues, and in certain preferred embodiments a mutated hinge region polypeptide may be selected that contains zero or one cysteine residue and that is derived from such a wild-type hinge region.

[0117] A mutated immunoglobulin hinge region polypeptide may comprise a hinge region that has its origin in an immunoglobulin of a species, of an immunoglobulin isotype or class, or of an immunoglobulin subclass that is different from that of the CH2 and CH3 domains. For instance, in certain embodiments of the invention, the SMIP may comprise a binding domain polypeptide that is fused to an immunoglobulin hinge region polypeptide comprising a wild-type human IgA hinge region polypeptide, or a mutated human IgA hinge region polypeptide that contains zero or only one cysteine residues, as described herein. Such a hinge region polypeptide may be fused to an immunoglobulin heavy chain CH2 region polypeptide from a different Ig isotype or class, for example an IgG subclass, which in certain preferred embodiments will be the IgG1 subclass.

[0118] In some embodiments, an anti-ErbB2 antibody of the invention is a V_{HH} molecule. V_{HH} molecules (or nanobodies), as known to the skilled artisan, are heavy chain variable domains derived from immunoglobulins naturally devoid of light chains, such as those derived from Camelidae as described in WO9404678, incorporated herein by reference. Such a V_{HH} molecule can be derived from antibodies raised in Camelidae species, for example in camel, llama, dromedary, alpaca and guanaco and is sometomes called a camelid or camelized variable domain. See e.g., Muyldermans., J. Biotechnology (2001) 74(4):277-302, incorporated herein by reference. Other species besides Camelidae may produce heavy chain antibodies naturally devoid of light chain. V_{HH} molecules are about 10 times smaller than IgG molecules. They are single polypeptides and very stable, resisting extreme pH and temperature conditions. Moreover, they are resistant to the action of proteases which is not the case for conventional antibodies. Furthermore, in vitro expression of V_{HH}s produces high yield, properly folded functional V_{HH}s. In addition, antibodies generated in Camelids will recognize epitopes other than those recognized by antibodies generated in vitro through the use of antibody libraries or via immunization of mammals other than Camelids (see WO 9749805, that is incorporated herein by reference).

[0119] Amino acid (AA) sequences of illustrative heavy chain variable domains (V_{H}) and light chain variable domains (V_{L}) of the anti-ErbB2 antibodies of this invention, are set forth in the attached Sequence Table. Table 1 provides the Sequence Identifiers (SEQ ID Nos) of the V_{H} and V_{L} domains. One hundred specific embodiments of the antibodies are identified as: S1R2A_CS_{—}1F7, S1R2A_CS_{—}1D11, S1R2C_CS_{—}1D3, S1R2C_CS_{—}1H12, S1R2A_CS_{—}1D3, S1R3B2_BMV_{—}1E1, S1R3C1_CS_{—}1D3, S1R3B2_DP47_{—}1E8, S1R3B2_BMV_{—}1G2, S1R3B2_BMV_{—}1H5, S1R3C1_CS_{—}1A6, S1R3B2_DP47_{—}1C9, S1R3B2_DP47_{—}1E10, S1R3C1_CS_{—}1B10, S1R3A1_BMV_{—}1F3, S1R3B1_BMV_{—}1G11, S1R3A1_BMV_{—}1G4, S1R3B1_BMV_{—}1H11, S1R3A1_CS_{—}1B9, S1R3B1_BMV_{—}1H9, S1R3A1_CS_{—}1B10, S1R3B1_BMV_{—}1C12, S1R3C1_BMV_{—}1H11, S1R3B1_BMV_{—}1A10, S1R3A1_CS_{—}1D11, S1R3C1_DP47_{—}1H1, S1R3A1_CS_{—}1B12, S1R3B1_BMV_{—}1H5, S1R3A1_DP47_{—}1A6, S1R3B1_DP47_{—}1E1, S1R3B1_BMV_{—}1A1, S1R3B1_DP47_{—}3A2, S1_R3A11DP47_{—}11B7, S1R3A1_DP47_{—}11D1, S1R3A1_DP47_{—}7F3, S1R2B_DP47_{—}4E3, S1R3C1_DP47_{—}2G2, S1R3A1_DP47_{—}11H6, S1R3A1_BMV_{—}3B1, S1R3A1_DP47_{—}6B9, S1R2A_CS_{—}10B8, S1R3A1_DP47_{—}7A6, S1R3B2_DP47_{—}2G3, S1R2B_CS_{—}6H11, S1R3A1_DP47_{—}10G1, S1R3A1_DP47_{—}7C1, S1R2A_DP47_{—}5D6, S1R3A1_DP47_{—}11F6, S1R3A1_DP47_{—}11D3, S1R3A1_CS_{—}8A8, S1R3A1_BMV_{—}5D10, S1R3A1_DP47_{—}11C1, S1R3A1_DP47_{—}4E1, S1R3A1_DP47_{—}10E1, S1R3A1_CS_{—}11C3, S1R3A1_CS_{—}13H11, S1R3A1_CS_{—}2D9, S1R2A_CS_{—}3D4, S1R3A1_DP47_{—}2H6, S1R3A1_DP47_{—}4G1, S1R2A_DP47_{—}3C1, S1R3A1_DP47_{—}7B2, S1R3B2_DP47_{—}4E2, S1R3A1_CS_{—}16C2, S1R3A1_CS_{—}11E5, S1R3A1_CS_{—}16D7, S1R2A_CS_{—}10B10, S1R3A1_CS_{—}15C2, S1R3A1_CS_{—}9C1, S1R2A_CS_{—}5A1, S1R2A_CS_{—}8C8, S1R3A1_CS_{—}13H5, S1R2B_CS_{—}5E9, S1R3A1_CS_{—}8F9, S1R3A1_CS_{—}14B5, S1R2A_CS_{—}9E10, S1R3A1_CS_{—}7A10, S1R3A1_BMV_{—}6H7, S1R3A1_CS_{—}12A11, S1R3A1_CS_{—}13D12, S1R3A1_CS_{—}7A8, S1R2A_CS_{—}2C9, S1R3A1_CS_{—}12D1, S1R2A_CS_{—}7D4, S1R3A1_CS_{—}15B8, S6R2_DP47_{—}1A10, S6R2_DP47_{—}1E11, S5R2_DP47_{—}1H1, S6R3_CS_{—}1G5, S6R2_DP47_{—}1H11, S5R3_DP47_{—}1A10, S5R2_DP47_{—}1D11, S5R2_CS_{—}1A8, S6R3_CS_{—}1B7, S6R2_CS_{—}1E5, S6R3_BMV_{—}1C2, S5R2_DP47_{—}1B10, S6R3_DP47_{—}1C12, S5R2_DP47_{—}1D10, and S6R3_DP47_{—}1H9.

TABLE 1
HUMAN ANTI-ErbB2 BINDING DOMAINS

SEQUENCE IDENTIFIER
(SEQ ID Nos:)
Variable Domain Protein
Sequences

| scFv | Heavy | Light |
|---|---|---|
| S1R2A_CS_1F7 | 1 | 2 and 63 |
| S1R2A_CS_1D11 | 3 | 4 and 64 |
| S1R2C_CS_1D3 | 5 and 65 | 6 and 66 |
| S1R2C_CS_1H12 | 7 and 67 | 8 and 68 |
| S1R2A_CS_1D3 | 9 | 10 and 69 |
| S1R3B2_BMV_1E1 | 11 | 12 and 70 |
| S1R3C1_CS_1D3 | 13 | 14 and 71 |
| S1R3B2_DP47_1E8 | 15 | 16 and 72 |
| S1R3B2_BMV_1G2 | 17 | 18 and 73 |
| S1R3B2_BMV_1H5 | 19 | 20 and 74 |
| S1R3C1_CS_1A6 | 21 | 22 and 75 |
| S1R3B2_DP47_1C9 | 23 | 24 and 76 |
| S1R3B2_DP47_1E10 | 25 | 26 and 77 |
| S1R3C1_CS_1B10 | 27 | 28 and 78 |
| S1R3A1_BMV_1F3 | 29 | 30 and 79 |
| S1R3B1_BMV_1G11 | 31 | 32 and 80 |
| S1R3A1_BMV_1G4 | 33 | 34 and 81 |
| S1R3B1_BMV_1H11 | 35 | 36 and 82 |
| S1R3A1_CS_1B9 | 37 | 38 and 83 |
| S1R3B1_BMV_1H9 | 39 | 40 and 84 |
| S1R3A1_CS_1B10 | 41 | 42 and 85 |
| S1R3B1_BMV_1C12 | 43 | 44 and 86 |
| S1R3C1_BMV_1H11 | 45 | 46 and 87 |
| S1R3B1_BMV_1A10 | 47 | 48 and 88 |
| S1R3A1_CS_1D11 | 49 | 50 and 89 |
| S1R3C1_DP47_1H1 | 51 | 52 and 90 |
| S1R3A1_CS_1B12 | 53 | 54 and 91 |
| S1R3B1_BMV_1H5 | 55 | 56 and 92 |
| S1R3A1_DP47_1A6 | 57 | 58 and 93 |
| S1R3B1_DP47_1E1 | 59 | 60 and 94 |
| S1R3B1_BMV_1A1 | 61 | 62 and 95 |
| S1R3B1_DP47_3A2 | 251 | 253 |
| S1R3A1_DP47_11B7 | 255 | 257 |
| S1R3A1_DP47_11D1 | 259 | 261 |
| S1R3A1_DP47_7F3 | 263 | 265 |
| S1R2B_DP47_4E3 | 267 | 269 |
| S1R3C1_DP47_2G2 | 271 | 273 |
| S1R3A1_DP47_11H6 | 275 | 277 |
| S1R3A1_BMV_3B1 | 279 | 281 |
| S1R3A1_DP47_6B9 | 283 | 285 |
| S1R2A_CS_10B8 | 287 | 289 |
| S1R3A1_DP47_7A6 | 291 | 293 |
| S1R3B2_DP47_2G3 | 295 | 297 |
| S1R2B_CS_6H11 | 299 | 301 |
| S1R3A1_DP47_10G1 | 303 | 305 |
| S1R3A1_DP47_7C1 | 307 | 309 |
| S1R2A_DP47_5D6 | 311 | 313 |
| S1R3A1_DP47_11F6 | 315 | 317 |
| S1R3A1_DP47_11D3 | 319 | 321 |
| S1R3A1_CS_8A8 | 323 | 325 |
| S1R3A1_BMV_5D10 | 327 | 329 |
| S1R3A1_DP47_11C1 | 331 | 333 |
| S1R3A1_DP47_4E1 | 335 | 337 |
| S1R3A1_DP47_10E1 | 339 | 341 |
| S1R3A1_CS_11C3 | 343 | 345 |
| S1R3A1_CS_13H11 | 347 | 349 |
| S1R3A1_CS_2D9 | 351 | 353 |
| S1R2A_CS_3D4 | 355 | 357 |
| S1R3A1_DP47_2H6 | 359 | 361 |
| S1R3A1_DP47_4G1 | 363 | 365 |
| S1R2A_DP47_3C1 | 367 | 369 |
| S1R3A1_DP47_7B2 | 371 | 373 |
| S1R3B2_DP47_4E2 | 375 | 377 |
| S1R3A1_CS_16C2 | 379 | 381 |
| S1R3A1_CS_11E5 | 383 | 385 |
| S1R3A1_CS_16D7 | 387 | 389 |
| S1R2A_CS_10B10 | 391 | 393 |
| S1R3A1_CS_15C2 | 395 | 397 |
| S1R3A1_CS_9C1 | 399 | 401 |
| S1R2A_CS_5A1 | 403 | 405 |
| S1R2A_CS_8C8 | 407 | 409 |
| S1R3A1_CS_13H5 | 411 | 413 |
| S1R2B_CS_5E9 | 415 | 417 |
| S1R3A1_CS_8F9 | 419 | 421 |
| S1R3A1_CS_14B5 | 423 | 425 |
| S1R2A_CS_9E10 | 427 | 429 |
| S1R3A1_CS_7A10 | 431 | 433 |
| S1R3A1_BMV_6H7 | 435 | 437 |
| S1R3A1_CS_12A11 | 439 | 441 |
| S1R3A1_CS_13D12 | 443 | 445 |
| S1R3A1_CS_7A8 | 447 | 449 |
| S1R2A_CS_2C9 | 451 | 453 |
| S1R3A1_CS_12D1 | 455 | 457 |
| S1R2A_CS_7D4 | 459 | 461 |
| S1R3A1_CS_15B8 | 463 | 465 |
| S6R3_DP47_1A10 | 467 | 469 |
| S6R2_DP47_1E11 | 471 | 473 |
| S5R2_DP47_1H11 | 475 | 477 |
| S6R3_CS_1G5 | 479 | 481 |
| S6R2_DP47_1H11 | 483 | 485 |
| S5R3_DP47_1A10 | 487 | 489 |
| S5R2_DP47_1D11 | 491 | 493 |
| S5R2_CS_1A8 | 495 | 497 |
| S6R3_CS_1B7 | 499 | 501 |
| S6R2_CS_1E5 | 503 | 505 |
| S6R3_BMV_1C2 | 507 | 509 |
| S5R2_DP47_1B10 | 511 | 513 |
| S6R3_DP47_1C12 | 515 | 517 |
| S5R2_DP47_1D10 | 519 | 521 |
| S6R3_DP47_1H9 | 523 | 525 |

[0120] According to the nomenclature used herein, “S1R2A_CS_{—}1F7” indicates clone 1F7 from round 2A of the first selection from the CS library.

[0121] An anti-ErbB2 binding protein of this invention may optionally comprise antibody constant regions or parts thereof. For example, a V_{L} domain may be attached at its C-terminal end to a light chain constant domain which can be a Cκ or a Cλ. Similarly, a V_{H} domain or portion thereof may be attached to all or part of a heavy chain constant region, which can be a IgA, IgD, IgE, IgG, or IgM constant region or any isotype subclass including IgG1, IgG2, IgG3, IgG4, IgA1 or IgA2. Constant region sequences are known in the art (see, for example, Kabat et al., Sequences of Proteins of Immunological Interest, No. 91-3242, National Institutes of Health Publications, Bethesda, Md. (1991)). Therefore, binding proteins within the scope of this invention may include V_{H} and V_{L} domains, or a portion thereof, combined with constant regions or portions thereof known in the art.

[0122] In certain embodiments of the invention, the ErbB2 binding protein comprises a V_{H} domain, a V_{L} domain, or a combination thereof, comprising the V_{H} or V_{L} amino acid sequence, respectively, found in any one of S1R2A_CS_{—}1F7, S1R2A_CS_{—}1 D11, S1R2C_CS_{—}1D3, S1R2C_CS_{—}1H12, S1R2A_CS_{—}1D3, S1R3B2_BMV_{—}1E1, S1R3C1_CS_{—}1D3, S1R3B2_DP47_{—}1E8, S1R3B2_BMV_{—}1G2, S1R3B2_BMV_{—}1H5, S1R3C1_CS_{—}1A6, S1R3B2_DP47_{—}1C9, S1R3B2_DP47_{—}1E10, S1R3C1_CS_{—}1B10, S1R3A1_BMV_{—}1F3, S1R3B1_BMV_{—}1G11, S1R3A1_BMV_{—}1G4, S1R3B1_BMV_{—}1H11, S1R3A1_CS_{—}1B9, S1R3B1_BMV_{—}1H9, S1R3A1_CS_{—}1B10, S1R3B1_BMV_{—}1C12, S1R3C1_BMV_{—}1H11, S1R3B1_BMV_{—}1A10, S1R3A1_CS_{—}1D11, S1R3C1_DP47_{—}1H1, S1R3A1_CS_{—}1B12, S1R3B1_BMV_{—}1H5, S1R3A1_DP47_{—}1A6, S1R3B1_DP47_{—}1E1, S1R3B1_BMV_{—}1A1, S1R3B1_DP47_{—}3A2, S1R3A1_DP47_{—}11B7, S1R3A1_DP47_{—}11D1, S1R3A1_DP47_{—}7F3, S1R2B_DP47_{—}4E3, S1R3C1_DP47_{—}2G2, S1R3A1_DP47_{—}11H6, S1R3A1_BMV_{—}3B1, S1R3A1_DP47_{—}6B9, S1R2A_CS_{—}10B8, S1R3A1_DP47_{—}7A6, S1R3B2_DP47_{—}2G3, S1R2B_CS_{—}6H11, S1R3A1_DP47_{—}10G1, S1R3A1_DP47_{—}7C1, S1R2A_DP47_{—}5D6, S1R3A1_DP47_{—}11F6, S1R3A1_DP47_{—}11D3, S1R3A1_CS_{—}8A8, S1R3A1_BMV_{—}5D10, S1R3A1_DP47_{—}11C1, S1R3A1_DP47_{—}4E1, S1R3A1_DP47_{—}10E1, S1R3A1_CS_{—}11C3, S1R3A1_CS_{—}13H11, S1R3A1_CS_{—}2D9, S1R2A_CS_{—}3D4, S1R3A1_DP47_{—}2H6, S1R3A1_DP47_{—}4G1, S1R2A_DP47_{—}3C1, S1R3A1_DP47_{—}7B2, S1R3B2_DP47_{—}4E2, S1R3A1_CS_{—}16C2, S1R3A1_CS_{—}11E5, S1R3A1_CS_{—}16D7, S1R2A_CS_{—}10B10, S1R3A1_CS_{—}15C2, S1R3A1_CS_{—}9C1, S1R2A_CS_{—}5A1, S1R2A_CS_{—}8C8, S1R3A1_CS_{—}13H5, S1R2B_CS_{—}5E9, S1R3A1_CS_{—}8F9, S1R3A1_CS_{—}14B5, S1R2A_CS_{—}9E10, S1R3A1_CS_{—}7A10, S1R3A1_BMV_{—}6H7, S1R3A1_CS_{—}12A11, S1R3A1_CS_{—}13D12, S1R3A1_CS_{—}7A8, S1R2A_CS_{—}2C9, S1R3A1_CS_{—}12D1, S1R2A_CS_{—}7D4, S1R3A1_CS_{—}15B8, S6R3_DP47_{—}1A10, S6R2_DP47_{—}1E11, S5R2_DP47_{—}1H11, S6R3_CS_{—}1G5, S6R2_DP47_{—}1H11, S5R3_DP47_{—}1A10, S5R2_DP47_{—}1D11, S5R2_CS_{—}1A8, S6R3_CS_{—}1B7, S6R2_CS_{—}1E5, S6R3_BMV_{—}1C2, S5R2_DP47_{—}1B10, S6R3_DP47_{—}1C12, S5R2_DP47_{—}1D10, and S6R3_DP47_{—}1H9. In some embodiments, the V_{H} and V_{L} are from the same reference antibody. That is, an anti-ErbB2 binding protein of the invention may comprise both the V_{H} and V_{L} amino acid sequence of one of the above-listed antibodies.

[0123] An anti-ErbB2 antibody of the invention may comprise one, two, three, four, five or all six complementarity determining regions (CDRs) from any one of the above-listed antibodies. In some embodiments, an anti-ErbB2 binding protein of the invention comprises the HCDR1, HCDR2 and HCDR3 (heavy chain CDR set), the LCDR1, LCDR2 and LCDR3 (light chain CDR set) or both the heavy chain CDR set and the light chain CDR set of one of the anti-ErbB2 antibodies exemplified herein.

[0124] A CDR3 sequence found in any one of the specifically exemplified anti-ErbB2 antibodies are encompassed within the scope of this invention. For example, in one embodiment, an anti-ErbB2 binding protein of the invention comprises an HCDR3 amino acid sequence found in any one of S1R2A_CS_{—}1F7, S1R2A_CS_{—}1D11, S1R2C_CS_{—}1D3, S1R2C_CS_{—}1H12, S1R2A_CS_{—}1D3, S1R3B2_BMV_{—}1E1, S1R3C1_CS_{—}1D3, S1R3B2_DP47_{—}1E8, S1R3B2_BMV_{—}1G2, S1R3B2_BMV_{—}1H5, S1R3C1_CS_{—}1A6, S1R3B2_DP47_{—}1C9, S1R3B2_DP47_{—}1E10, S1R3C1_CS_{—}1B10, S1R3A1_BMV_{—}1F3, S1R3B1_BMV_{—}1G11, S1R3A1_BMV_{—}1G4, S1R3B1_BMV_{—}1H11, S1R3A1_CS_{—}1B9, S1R3B1_BMV_{—}1H9, S1R3A1_CS_{—}1B10, S1R3B1_BMV_{—}1C12, S1R3C1_BMV_{—}1H1, S1R3B1_BMV_{—}1A10, S1R3A1_CS_{—}1D11, S1R3C1_DP47_{—}1H1, S1R3A1_CS_{—}1B12, S1R3B1_BMV_{—}1H5, S1R3A1_DP47_{—}1A6, S1R3B1_DP47_{—}1E1, S1R3B1_BMV_{—}1A1, S1R3B1_DP47_{—}3A2, S1R3A1_DP47_{—}11B7, S1R3A1_DP47_{—}11D1, S1R3A1_DP47_{—}7F3, S1R2B_DP47_{—}4E3, S1R3C1_DP47_{—}2G2, S1R3A1_DP47_{—}11H6, S1R3A1_BMV_{—}3B1, S1R3A1_DP47_{—}6B9, S1R2A_CS_{—}10B8, S1R3A1_DP47_{—}7A6, S1R3B2_DP47_{—}2G3, S1R2B_CS_{—}6H11, S1R3A1_DP47_{—}10G1, S1R3A1_DP47_{—}7C1, S1R2A_DP47_{—}5D6, S1R3A1_DP47_{—}11F6, S1R3A1_DP47_{—}11D3, S1R3A1_CS_{—}8A8, S1R3A1_BMV_{—}5D10, S1R3A1_DP47_{—}11C1, S1R3A1_DP47_{—}4E1, S1R3A1_DP47_{—}10E1, S1R3A1_CS_{—}11C3, S1R3A1_CS_{—}13H11, S1R3A1_CS_{—}2D9, S1R2A_CS_{—}3D4, S1R3A1_DP47_{—}2H6, S1R3A1_DP47_{—}4G1, S1R2A_DP47_{—}3C1, S1R3A1_DP47_{—}7B2, S1R3B2_DP47_{—}4E2, S1R3A1CS_{—}16C2, S1R3A1CS_{—}11E5, S1R3A1CS_{—}16D7, S1R2A_CS_{—}10B10, S1R3A1_CS_{—}15C2, S1R3A1_CS_{—}9C1, S1R2A_CS_{—}5A1, S1R2A_CS_{—}8C8, S1R3A1_CS_{—}13H5, S1R2B_CS_{—}5E9, S1R3A1_CS_{—}8F9, S1R3A1_CS_{—}14B5, S1R2A_CS_{—}9E10, S1R3A1_CS_{—}7A10, S1R3A1_BMV_{—}6H7, S1R3A1_CS_{—}12A11, S1R3A1_CS_{—}13D12, S1R3A1_CS_{—}7A8, S1R2A_CS_{—}2C9, S1R3A1_CS_{—}12D1, S1R2A_CS_{—}7D4, S1R3A1_CS_{—}15B8, S6R3_DP47_{—}1A10, S6R2_DP47_{—}1E11, S5R2_DP47_{—}1H11, S6R3_CS_{—}1G5, S6R2_DP47_{—}1H11, S5R3_DP47_{—}1A10, S5R2_DP47_{—}1D11, S5R2_CS_{—}1A8, S6R3_CS_{—}1B7, S6R2_CS_{—}1E5, S6R3_BMV_{—}1C2, S5R2_DP47_{—}1B10, S6R3_DP47_{—}1C12, S5R2_DP47_{—}1D10, and S6R3_DP47_{—}1H9.

[0125] In certain embodiments, the V_{H} and/or V_{L} domains may be germlined, i.e., the framework regions (FR) of these domains are mutated using conventional molecular biology techniques to match the germline sequence. In other embodiments, the FR sequences remain diverged from the consensus germline sequences.

[0126] In one embodiment, mutagenesis is used to make an antibody more similar to one or more germline sequences. This may be desirable when mutations are introduced into the framework region of an antibody through somatic mutagenesis or through error prone PCR. Germline sequences for the V_{H} and V_{L} domains can be identified by performing amino acid and nucleic acid sequence alignments against the VBASE database (MRC Center for Protein Engineering, UK). VBASE is a comprehensive directory of all human germline variable region sequences compiled from over a thousand published sequences, including those in the current releases of the Genbank and EMBL data libraries. In some embodiments, the FR regions of the scFvs are mutated in conformity with the closest matches in the VBASE database and the CDR portions are kept intact.

[0127] In certain embodiments, an anti-ErbB2 binding of this invention specifically binds the same epitope as, competes with or cross-competes with an antibody selected from the group consisting of: S1R2A_CS_{—}1F7, S1R2A_CS_{—}1D11, S1R2C_CS_{—}1D3, S1R2C_CS_{—}1H12, S1R2A_CS_{—}1D3, S1R3B2_BMV_{—}1E1, S1R3C1_CS_{—}1D3, S1R3B2_DP47_{—}1E8, S1R3B2_BMV_{—}1G2, S1R3B2_BMV_{—}1H5, S1R3C1_CS_{—}1A6, S1R3B2_DP47_{—}1C9, S1R3B2_DP47_{—}1E10, S1R3C1_CS_{—}1B10, S1R3A1_BMV_{—}1F3, S1R3B1_BMV_{—}1G11, S1R3A1_BMV_{—}1G4, S1R3B1_BMV_{—}1H11, S1R3A1_CS_{—}1B9, S1R3B1_BMV_{—}1H9, S1R3A1_CS_{—}1B10, S1R3B1_BMV_{—}1C12, S1R3C1_BMV_{—}1H11, S1R3B1_BMV_{—}1A10, S1R3A1_CS_{—}1D1, S1R3C1_DP47_{—}1H1, S1R3A1_CS_{—}1B12, S1R3B1_BMV_{—}1H5, S1R3A1_DP47_{—}1A6, S1R3B1_DP47_{—}1E1, S1R3B1_BMV_{—}1A1, S1R3B1_DP47_{—}3A2, S1R3A1_DP47_{—}11B7, S1R3A1_DP47_{—}11D1, S1R3A1_DP47_{—}7F3, S1R2B_DP47_{—}4E3, S1R3C1_DP47_{—}2G2, S1R3A1_DP47_{—}11H6, S1R3A1_BMV_{—}3B1, S1R3A1_DP47_{—}6B9, S1R2A_CS_{—}10B8, S1R3A1_DP47_{—}7A6, S1R3B2_DP47_{—}2G3, S1R2B_CS_{—}6H11, S1R3A1_DP47_{—}10G1, S1R3A1_DP47_{—}7C1, S1R2A_DP47_{—}5D6, S1R3A1_DP47_{—}11F6, S1R3A1_DP47_{—}11D3, S1R3A1_CS_{—}8A8, S1R3A1_BMV_{—}5D10, S1R3A1_DP47_{—}11C1, S1R3A1_DP47_{—}4E1, S1R3A1_DP47_{—}10E1, S1R3A1_CS_{—}11C3, S1R3A1_CS_{—}13H11, S1R3A1_CS_{—}2D9, S1R2A_CS_{—}3D4, S1R3A1_DP47_{—}2H6, S1R3A1_DP47_{—}4G1, S1R2A_DP47_{—}3C1, S1R3A1_DP47_{—}7B2, S1R3B2_DP47_{—}4E2, S1R3A1_CS_{—}16C2, S1R3A1_CS_{—}11E5, S1R3A1_CS_{—}16D7, S1R2A_CS_{—}10B10, S1R3A1_CS_{—}15C2, S1R3A1_CS_{—}9C1, S1R2A_CS_{—}5A1, S1R2A_CS_{—}8C8, S1R3A1_CS_{—}13H5, S1R2B_CS_{—}5E9, S1R3A1_CS_{—}8F9, S1R3A1_CS_{—}14B5, S1R2A_CS_{—}9E10, S1R3A1_CS_{—}7A10, S1R3A1_BMV_{—}6H7, S1R3A1_CS_{—}12A11, S1R3A1_CS_{—}13D12, S1R3A1_CS_{—}7A8, S1R2A_CS_{—}2C9, S1R3A1_CS_{—}12D1, S1R2A_CS_{—}7D4, S1R3A1_CS_{—}15B8, S6R3_DP47_{—}1A10, S6R2_DP47_{—}1E11, S5R2_DP47_{—}1H1, S6R3_CS_{—}1G5, S6R2_DP47_{—}1H1, S5R3_DP47_{—}1A10, S5R2_DP47_{—}1 D11, S5R2_CS_{—}1A8, S6R3_CS_{—}1B7, S6R2_CS_{—}1E5, S6R3_BMV_{—}1C2, S5R2_DP47_{—}1B10, S6R3_DP47_{—}1C12, S5R2_DP47_{—}1D10, and S6R3_DP47_{—}1H9, for binding to ErbB2. In some embodiments, such competing or ErbB2-mediated cross-competing binding protein is an ErbB2 agonist and may further reduce proliferation of a cancer cell, reduce the rate of growth of an ErbB2-expressing tumor and/or increases apoptosis in such cells and tumors. In some embodiments, such competing or cross-competing binding proteins bind ErbB2 ECD homo-dimers but do not bind ECD monomers or shed ECD.

[0128] Such antibodies can be identified in a competitive binding assay. One can determine whether an antibody binds to the same epitope or cross competes for binding with a binding protein of the invention antibody by using methods known in the art. In one embodiment, one allows the binding protein of the invention to bind to ErbB2 under saturating conditions and then measures the ability of the test protein to bind to the ECD. If the test antibody is able to bind to the ECD at the same time as the reference binding protein, then the test antibody binds to a different epitope than the reference binding protein. However, if the test protein is not able to bind the to the ECD at the same time, then the test protein binds to the same epitope, an overlapping epitope, or an epitope that is in close proximity to the epitope bound by the binding protein of the invention. This experiment can be performed using ELISA, RIA, BIACORE™, or flow cytometry. To test whether a binding protein cross-competes with another anti-ErbB2 binding protein, one may use the competition method described above in two directions, i.e. determining if the known binder blocks the test binder and vice versa. In a preferred embodiment, the experiment is performed using BIACORE™.

[0129] In one embodiment, the association constant (K_{A}) of an ErbB2 binding protein of the invention is at least 10⁶ M⁻¹. In another embodiment, the association constant of these antibodies for human ErbB2 is at least 10⁹ M⁻¹. In other embodiments, the association constant of these antibodies for human ErbB2 is at least 10¹⁰ M⁻¹, at least 10¹¹ M⁻¹, or at least 10¹² M⁻¹. The binding affinity may be determined using techniques known in the art, such as ELISA, biosensor technology, such as biospecific interaction analysis, or other techniques including those described in this application.

[0130] In addition to sequence homology analyses, epitope mapping (see, e.g., Epitope Mapping Protocols, ed. Morris, Humana Press, 1996), and secondary and tertiary structure analyses can be carried out to identify specific 3D structures assumed by the presently disclosed antibodies and their complexes with antigens. Such methods include, but are not limited to, X-ray crystallography (Engstom (1974) Biochem. Exp. Biol., 11:7-13) and computer modeling of virtual representations of the present antibodies (Fletterick et al. (1986) Computer Graphics and Molecular Modeling, in Current Communications in Molecular Biology, Cold Spring Harbor Laboratory, Cold Spring Harbor, N.Y.).

[0131] The invention further provides anti-ErbB2 binding proteins that comprise altered V_{H} and/or V_{L} sequence(s) compared to the sequences in Table 1. Such binding proteins may be produced by a skilled artisan using techniques well-known in the art. For example, amino acid substitutions, deletions, or additions can be introduced in FR and/or CDR regions. FR changes are usually designed to improve the stability and immunogenicity of the antibody, while CDR changes are typically designed to increase antibody affinity for its antigen. The changes that increase affinity may be tested by altering CDR sequence and measuring antibody affinity for its target (see Antibody Engineering, 2nd ed., Oxford University Press, ed. Borrebaeck, 1995).

[0132] Antibodies whose CDR sequences differ insubstantially from those found in any one of specifically exemplified anti-ErbB2 antibodies are encompassed within the scope of this invention. Typically, this involves substitution of an amino acid with an amino acid having similar charge, hydrophobic, or stereochemical characteristics. More drastic substitutions in FR regions, in contrast to CDR regions, may also be made as long as they do not adversely affect (e.g., reduce affinity by more than 50% as compared to unsubstituted antibody) the binding properties of the binding protein. Substitutions may also be made to germline the binding protein or stabilize the antigen binding site.

[0133] Conservative modifications will produce molecules having functional and chemical characteristics similar to those of the molecule from which such modifications are made. In contrast, substantial modifications in the functional and/or chemical characteristics of the molecules may be accomplished by selecting substitutions in the amino acid sequence that differ significantly in their effect on maintaining (1) the structure of the molecular backbone in the area of the substitution, for example, as a sheet or helical conformation, (2) the charge or hydrophobicity of the molecule at the target site, or (3) the size of the molecule.

[0134] For example, a “conservative amino acid substitution” may involve a substitution of a native amino acid residue with a normative residue such that there is little or no effect on the polarity or charge of the amino acid residue at that position. (See, for example, MacLennan et al., 1998, Acta Physiol. Scand. Suppl. 643:55-67; Sasaki et al., 1998, Adv. Biophys. 35:1-24). Desired amino acid substitutions (whether conservative or non-conservative) can be determined by those skilled in the art at the time such substitutions are desired. For example, amino acid substitutions can be used to identify important residues of the molecule sequence, or to increase or decrease the affinity of the molecules described herein. Exemplary amino acid substitutions include, but are not limited to, those set forth in Table 2.

TABLE 2
Amino Acid Substitutions

| Original | Exemplary | More Conservative |
|---|---|---|
| Residues | Substitutions | Substitutions |
| Ala (A) | Val, Leu, Ile | Val |
| Arg (R) | Lys, Gln, Asn | Lys |
| Asn (N) | Gln | Gln |
| Asp (D) | Glu | Glu |
| Cys (C) | Ser, Ala | Ser |
| Gln (Q) | Asn | Asn |
| Gly (G) | Pro, Ala | Ala |
| His (H) | Asn, Gln, Lys, Arg | Arg |
| Ile (I) | Leu, Val, Met, Ala, Phe, | Leu |
| | Norleucine | |
| Leu (L) | Norleucine, Ile, Val, Met, Ala, Phe | Ile |
| Lys (K) | Arg, 1,4Diamino-butyric Acid, | Arg |
| | Gln, Asn | |
| Met (M) | Leu, Phe, Ile | Leu |
| Phe (F) | Leu, Val, Ile, Ala, Tyr | Leu |
| Pro (P) | Ala | Gly |
| Ser (S) | Thr, Ala, Cys | Thr |
| Thr (T) | Ser | Ser |
| Trp (W) | Tyr, Phe | Tyr |
| Tyr (Y) | Trp, Phe, Thr, Ser | Phe |
| Val (V) | Ile, Met, Leu, Phe, Ala, Norleucine | Leu |

[0135] In certain embodiments, conservative amino acid substitutions also encompass non-naturally occurring amino acid residues that are typically incorporated by chemical peptide synthesis rather than by synthesis in biological systems.

[0136] In one embodiment, the method for making a variant V_{H} domain comprises adding, deleting, or substituting at least one amino acid in the disclosed V_{H} domains, and testing the variant V_{H} domain for ErbB2 binding or modulation of ErbB2 activity.

[0137] An analogous method for making a variant V_{L} domain comprises adding, deleting, or substituting at least one amino acid in the disclosed V_{L} domains, and testing the variant V_{L} domain for ErbB2 binding or modulation of ErbB2 activity.

[0138] A further aspect of the invention provides a method for preparing antibodies or antigen-binding fragments that specifically bind ErbB2. The method comprises:

[0139] (a) providing a starting repertoire of nucleic acids encoding a V_{H} domain that lacks at least one CDR or contains at least one CDR to be replaced;

[0140] (b) inserting into or replacing the CDR region of the starting repertoire with at least one donor nucleic acid encoding an amino acid sequence as substantially set out herein for a V_{H} CDR, yielding a product repertoire;

[0141] (c) expressing the nucleic acids of the product repertoire;

[0142] (d) selecting a specific antigen-binding fragment that binds to ErbB2; and

[0143] (e) recovering the specific antigen-binding fragment or nucleic acid encoding it.

[0144] In an analogous method, at least one V_{L} CDR or V_{H} CDR of the invention is combined with a repertoire of nucleic acids encoding a V_{L} or V_{H} domain, respectively, that lacks at least one CDR or contains at least one CDR to be replaced. The at least one V_{H} or V_{L} CDR may be a CDR1, a CDR2, a CDR3, or a combination thereof, found in any of the specifically exemplified anti-ErbB2 antibodies.

[0145] In one embodiment, the variable domain includes a CDR3 to be replaced or lacks a CDR3 encoding region and the at least one donor nucleic acid encodes a CDR3 amino acid sequence found in any one of SEQ ID Nos:1-95, 251, 253, 255, 257, 259, 261, 263, 265, 267, 269, 271, 273, 275, 277, 279, 281, 283, 285, 287, 289, 291, 293, 295, 297, 299, 301, 303, 305, 307, 309, 311, 313, 315, 317, 319, 321, 323, 325, 327, 329, 331, 333, 335, 337, 339, 341, 343, 345, 347, 349, 351, 353, 355, 357, 359, 361, 363, 365, 367, 369, 371, 373, 375, 377, 379, 381, 383, 385, 387, 389, 391, 393, 395, 397, 399, 401, 403, 405, 407, 409, 411, 413, 415, 417, 419, 421, 423, 425, 427, 429, 431, 433, 435, 437, 439, 441, 443, 445, 447, 449, 451, 453, 455, 457, 459, 461, 463, 465, 467, 469, 471, 473, 475, 477, 479, 481, 483, 485, 487, 489, 491, 493, 495, 497, 499, 501, 503, 507, 509, 511, 513, 515, 517, 519, 521, 523, 525, or substantially as found in such sequence.

[0146] In another embodiment, the variable domain includes a CDR1 to be replaced or lacks a CDR1 encoding region and the at least one donor nucleic acid encodes a CDR1 amino acid sequence found in any one of SEQ ID Nos: 1-95, 251, 253, 255, 257, 259, 261, 263, 265, 267, 269, 271, 273, 275, 277, 279, 281, 283, 285, 287, 289, 291, 293, 295, 297, 299, 301, 303, 305, 307, 309, 311, 313, 315, 317, 319, 321, 323, 325, 327, 329, 331, 333, 335, 337, 339, 341, 343, 345, 347, 349, 351, 353, 355, 357, 359, 361, 363, 365, 367, 369, 371, 373, 375, 377, 379, 381, 383, 385, 387, 389, 391, 393, 395, 397, 399, 401, 403, 405, 407, 409, 411, 413, 415, 417, 419, 421, 423, 425, 427, 429, 431, 433, 435, 437, 439, 441, 443, 445, 447, 449, 451, 453, 455, 457, 459, 461, 463, 465, 467, 469, 471, 473, 475, 477, 479, 481, 483, 485, 487, 489, 491, 493, 495, 497, 499, 501, 503, 507, 509, 511, 513, 515, 517, 519, 521, 523, 525.

[0147] In another embodiment, the variable domain includes a CDR2 to be replaced or lacks a CDR2 encoding region and the at least one donor nucleic acid encodes a CDR2 amino acid sequence found in any one of SEQ ID Nos: 1-95, 251, 253, 255, 257, 259, 261, 263, 265, 267, 269, 271, 273, 275, 277, 279, 281, 283, 285, 287, 289, 291, 293, 295, 297, 299, 301, 303, 305, 307, 309, 311, 313, 315, 317, 319, 321, 323, 325, 327, 329, 331, 333, 335, 337, 339, 341, 343, 345, 347, 349, 351, 353, 355, 357, 359, 361, 363, 365, 367, 369, 371, 373, 375, 377, 379, 381, 383, 385, 387, 389, 391, 393, 395, 397, 399, 401, 403, 405, 407, 409, 411, 413, 415, 417, 419, 421, 423, 425, 427, 429, 431, 433, 435, 437, 439, 441, 443, 445, 447, 449, 451, 453, 455, 457, 459, 461, 463, 465, 467, 469, 471, 473, 475, 477, 479, 481, 483, 485, 487, 489, 491, 493, 495, 497, 499, 501, 503, 507, 509, 511, 513, 515, 517, 519, 521, 523, 525.

[0148] In another embodiment, the variable domain includes a CDR3 to be replaced or lacks a CDR3 encoding region and further comprises a CDR1 to be replaced or lacks a CDR1 encoding region, where the at least one donor nucleic acid encodes a CDR3a CDR1 amino acid sequence, respectively, found in any one of SEQ ID Nos: 1-95, 251, 253, 255, 257, 259, 261, 263, 265, 267, 269, 271, 273, 275, 277, 279, 281, 283, 285, 287, 289, 291, 293, 295, 297, 299, 301, 303, 305, 307, 309, 311, 313, 315, 317, 319, 321, 323, 325, 327, 329, 331, 333, 335, 337, 339, 341, 343, 345, 347, 349, 351, 353, 355, 357, 359, 361, 363, 365, 367, 369, 371, 373, 375, 377, 379, 381, 383, 385, 387, 389, 391, 393, 395, 397, 399, 401, 403, 405, 407, 409, 411, 413, 415, 417, 419, 421, 423, 425, 427, 429, 431, 433, 435, 437, 439, 441, 443, 445, 447, 449, 451, 453, 455, 457, 459, 461, 463, 465, 467, 469, 471, 473, 475, 477, 479, 481, 483, 485, 487, 489, 491, 493, 495, 497, 499, 501, 503, 507, 509, 511, 513, 515, 517, 519, 521, 523, 525.

[0149] In another embodiment, the variable domain includes a CDR3 to be replaced or lacks a CDR3 encoding region and further comprises a CDR2 to be replaced or lacks a CDR2 encoding region, where the at least one donor nucleic acid encodes a CDR3 or CDR2 amino acid sequence, respectively, found in any one of SEQ ID Nos: 1-95, 251, 253, 255, 257, 259, 261, 263, 265, 267, 269, 271, 273, 275, 277, 279, 281, 283, 285, 287, 289, 291, 293, 295, 297, 299, 301, 303, 305, 307, 309, 311, 313, 315, 317, 319, 321, 323, 325, 327, 329, 331, 333, 335, 337, 339, 341, 343, 345, 347, 349, 351, 353, 355, 357, 359, 361, 363, 365, 367, 369, 371, 373, 375, 377, 379, 381, 383, 385, 387, 389, 391, 393, 395, 397, 399, 401, 403, 405, 407, 409, 411, 413, 415, 417, 419, 421, 423, 425, 427, 429, 431, 433, 435, 437, 439, 441, 443, 445, 447, 449, 451, 453, 455, 457, 459, 461, 463, 465, 467, 469, 471, 473, 475, 477, 479, 481, 483, 485, 487, 489, 491, 493, 495, 497, 499, 501, 503, 507, 509, 511, 513, 515, 517, 519, 521, 523, 525.

[0150] In another embodiment, the variable domain includes a CDR3 to be replaced or lacks a CDR3 encoding region and further comprises a CDR1 and a CDR2 to be replaced or lacks a CDR1 and a CDR2 encoding region, where the at least one donor nucleic acid encodes CDR3, CDR1 or CDR2 amino acid sequence, respectively, found in any one of SEQ ID Nos: 1-95, 251, 253, 255, 257, 259, 261, 263, 265, 267, 269, 271, 273, 275, 277, 279, 281, 283, 285, 287, 289, 291, 293, 295, 297, 299, 301, 303, 305, 307, 309, 311, 313, 315, 317, 319, 321, 323, 325, 327, 329, 331, 333, 335, 337, 339, 341, 343, 345, 347, 349, 351, 353, 355, 357, 359, 361, 363, 365, 367, 369, 371, 373, 375, 377, 379, 381, 383, 385, 387, 389, 391, 393, 395, 397, 399, 401, 403, 405, 407, 409, 411, 413, 415, 417, 419, 421, 423, 425, 427, 429, 431, 433, 435, 437, 439, 441, 443, 445, 447, 449, 451, 453, 455, 457, 459, 461, 463, 465, 467, 469, 471, 473, 475, 477, 479, 481, 483, 485, 487, 489, 491, 493, 495, 497, 499, 501, 503, 507, 509, 511, 513, 515, 517, 519, 521, 523, 525.

[0151] The present invention further encompasses anti-ErbB2 antibodies comprising an HCDR3, an LCDR3 or both, three heavy chain CDRs, three light chain CDRs or all six CDRs, a V_{H} or V_{L} or an antigen-binding portion of such a V_{H} or V_{L} or both, of a specifically provided molecule herein

[0152] Using recombinant DNA methodology, a disclosed CDR sequence may be introduced into a repertoire of V_{H} or V_{L} domains lacking the respective CDR (Marks et al. (BioTechnology (1992) 10: 779-783). For example, a primer adjacent to the 5′ end of the variable domain and a primer to the third FR can be used to generate a repertoire of variable domain sequences lacking CDR3. This repertoire can be combined with a CDR3 of an antibody disclosed herein. Using analogous techniques, portions of a disclosed CDR sequence may be shuffled with portions of CDR sequences from other antibodies to provide a repertoire of antigen-binding fragments that bind ErbB2. Either repertoire can be expressed in a host system such as phage display (described in WO 92/01047 and its corresponding U.S. Pat. No. 5,969,108) so suitable antigen-binding fragments that bind to ErbB2 can be selected.

[0153] A further alternative uses random mutagenesis of a V_{H} or V_{L} sequence disclosed herein to generate variant V_{H} or V_{L} domains still capable of binding ErbB2. A technique using error-prone PCR is described by Gram et al. (Proc. Nat. Acad. Sci. U.S.A. (1992) 89: 3576-3580).

[0154] Another method uses direct mutagenesis of a V_{H} or V_{L} sequence disclosed herein. Such techniques are described by Barbas et al. (Proc. Nat. Acad. Sci. U.S.A. (1994) 91: 3809-3813) and Schier et al. (J. Mol. Biol. (1996) 263: 551-567).

[0155] Also encompassed by the invention is a portion of a variable domain that comprises at least one CDR region substantially as set out herein and, optionally, intervening framework regions from the V_{H} or V_{L} domains as set out herein. Variable domains lacking a portion of the N-terminus of the FR1 and/or a portion of the C, terminus of the FR4 are also encompassed by the invention. Additional residues at the N-terminal of the FR1 or C-terminal of the FR4 of the variable domain may not be the same residues found in naturally occurring antibodies. For example, construction of antibodies by recombinant DNA techniques often introduces N- or C-terminal residues from its use of linkers. Some linkers may be used to join variable domains to other variable domains (e.g., diabodies), constant domains, or proteinaceous labels.

[0156] Although the embodiments specifically exemplified herein comprise a “matching” pair of V_{H} and V_{L} domains, a skilled artisan will recognize that alternative embodiments may comprise binding proteins containing only a single CDR from either V_{L} or V_{H} domain. Either one of the V_{H} domain or V_{L} domain can be used to screen for complementary domains capable of forming a two-domain specific binding protein capable of, binding to ErbB2 ECD. The screening may be accomplished by phage display screening methods using the so-called hierarchical dual combinatorial approach disclosed in WO 92/01047. In this approach, an individual colony containing either a H or L chain clone is used to infect a complete library of clones encoding the other chain (L or H), and the resulting two-chain specific antigen-binding domain is selected in accordance with phage display techniques as described.

[0157] In some alternative embodiments, the anti-ErbB2 binding protein can be linked to a protein (e.g., albumin) by chemical cross-linking or recombinant methods. The disclosed antibodies may also be linked to a variety of nonproteinaceous polymers (e.g., polyethylene glycol, polypropylene glycol, or polyoxyalkylenes) in manners set forth in U.S. Pat. Nos. 4,640,835; 4,496,689; 4,301,144; 4,670,417; 4,791,192; or 4,179,337. The binding proteins can be chemically modified by covalent conjugation to a polymer, for example, to increase their half-life in blood circulation. Exemplary polymers and attachment methods are shown in U.S. Pat. Nos. 4,766,106; 4,179,337; 4,495,285; and 4,609,546.

[0158] Binding proteins of the invention can be modified to alter their glycosylation; that is, at least one carbohydrate moiety can be deleted or added to the binding protein, for example to modify antibody dependent (or Fc dependent) cellular cytotoxicity (ADCC/FcDCC), in particular to enhance ADCC/FcDCC.

[0159] Deletion or addition of glycosylation sites can be accomplished by changing amino acid sequence to delete or create glycosylation consensus sites, that are well known in the art. Another means of adding carbohydrate moieties is the chemical or enzymatic coupling of glycosides to amino acid residues of the antibody (see WO 87/05330 and Aplin et al. (1981) CRC Crit. Rev. Biochem., 22: 259-306). Removal of carbohydrate moieties can also be accomplished chemically or enzymatically (see Hakimuddin et al. (1987) Arch. Biochem. Biophys., 259: 52; Edge et al. (1981) Anal. Biochem., 118: 131; Thotakura et al. (1987) Meth. Enzymol., 138: 350).

[0160] Methods for altering an antibody constant region are known in the art. Antibodies with altered function (e.g., altered affinity for an effector ligand such as FcR on a cell or the C1 component of complement) can be produced by replacing at least one amino acid residue in the constant portion of the antibody with a different residue (see e.g., EP 388,151 A1, U.S. Pat. No. 5,624,821 and U.S. Pat. No. 5,648,260). Similar types of alterations could be described that if applied to a murine or other species antibody would reduce or eliminate similar functions.

[0161] For example, it is possible to alter the affinity of an Fc region of an antibody (e.g., an IgG, such as a human IgG) for FcR (e.g., Fc gamma R1) or C1q. The affinity may be altered by replacing at least one specified residue with at least one residue having an appropriate functionality on its side chain, or by introducing a charged functional group, such as glutamate or aspartate, or perhaps an aromatic non-polar residue such as phenylalanine, tyrosine, tryptophan or alanine (see e.g., U.S. Pat. No. 5,624,821).

[0162] For example, replacing residue 297 (asparagine) with alanine in the IgG constant region significantly inhibits recruitment of effector cells, while only slightly reducing (about three fold weaker) affinity for C1q (see e.g., U.S. Pat. No. 5,624,821). The numbering of the residues in the heavy chain is that of the EU index (see Kabat et al., 1991 supra). This alteration destroys the glycosylation site and it is believed that the presence of carbohydrate is required for Fc receptor binding. Any other substitution at this site that destroys the glycosylation site is believed to cause a similar decrease in lytic activity. Other amino acid substitutions, e.g., changing any one of residues 318 (Glu), 320 (Lys) and 322 (Lys), to Ala, are also known to abolish Clq binding to the Fc region of IgG antibodies (see e.g., U.S. Pat. No. 5,624,821).

[0163] Modified binding proteins can be produced that have a reduced interaction with an Fc receptor. For example, it has been shown that in human IgG₃, which binds to the human Fc gamma R1 receptor, changing Leu 235 to Glu destroys its interaction with the receptor. Mutations on adjacent or close sites in the hinge link region of an antibody (e.g., replacing residues 234, 236 or 237 with Ala) can also be used to affect antibody affinity for the Fc gamma R1 receptor. The numbering of the residues in the heavy chain is based in the EU index (see Kabat et al., 1991 supra).

[0164] Additional methods for altering the lytic activity of an binding protein, for example, by altering at least one amino acid in the N-terminal region of the C_{H}2 domain, are described in WO 94/29351 by Morgan et al. and U.S. Pat. No. 5,624,821.

[0165] One of skill in the art will appreciate that the modifications described above are not all-exhaustive, and that many other modifications are obvious to a skilled artisan in light of the teachings of the present disclosure.

[0166] A binding protein of this invention may be tagged with a detectable or functional label. These labels include radiolabels (e.g., ¹³¹I or ⁹⁹Tc), enzymatic labels (e.g., horseradish peroxidase or alkaline phosphatase), and other chemical moieties (e.g., biotin).

[0167] In some embodiments, the invention features a human, monoclonal antibody that specifically binds the ECD, ErbB2, in particular, human ErbB2 and posseses one or more of the following characteristics: (1) it is an in vitro generated antibody (2) it is an in vivo generated antibody (e.g., transgenic mouse system); (3) it binds to ErbB2 with an association constant of at least 10¹² M⁻¹; (4) it binds to ErbB2 with an association constant of at least 10¹¹ M⁻¹; (5) it binds to ErbB2 with an association constant of at least 10¹⁰ M⁻¹; (6) it binds to ErbB2 with an association constant of at least 10⁹ M⁻¹; (7) it binds to ErbB2 with an association constant of at least 10⁶ M⁻¹; (8) it binds to ErbB2 with a dissociation constant of 500 nM or less; (9) it binds to ErbB2 with a dissociation constant of 10 nM or less; (10) it binds to ErbB2 with a dissociation constant of 150 pM or less; (11) it binds to ErbB2 with a dissociation constant of 60 pM or less.

### III. Nucleic Acids, Cloning and Expression Systems

[0168] In another aspect, the invention provides isolated nucleic acids encoding an anti-ErbB2 binding protein of the invention. The nucleic acids may comprise DNA or RNA, and they may be synthetic (completely or partially) or recombinant (completely or partially). Reference to a nucleotide sequence as set out herein encompasses a DNA molecule with the specified sequence, and encompasses a RNA molecule with the specified sequence in which U is substituted for T.

[0169] The invention also contemplates nucleic acids that comprise a coding sequence for a CDR1, CDR2 or CDR3, a frame-work sequence (including FR1, FR2, FR3 and/or FR4), a V_{H} domain, a V_{L} domain, or combinations thereof, as disclosed herein, or a sequence substantially identical thereto (e.g., a sequence at least 85%, 90%, 95%, 96%, 97%, 98%, 99% or higher identical thereto, or that is capable of hybridizing under stringent conditions to the sequences disclosed).

[0170] In one embodiment, the isolated nucleic acid has a nucleotide sequence encoding a heavy chain variable region and/or a light chain variable region of an anti-ErbB2 binding protein comprising at least one heavy chain CDR or light chain CDR, respectively, chosen from the CDR amino acid sequences found in SEQ ID Nos:1-95, 251, 253, 255, 257, 259, 261, 263, 265, 267, 269, 271, 273, 275, 277, 279, 281, 283, 285, 287, 289, 291, 293, 295, 297, 299, 301, 303, 305, 307, 309, 311, 313, 315, 317, 319, 321, 323, 325, 327, 329, 331, 333, 335, 337, 339, 341, 343, 345, 347, 349, 351, 353, 355, 357, 359, 361, 363, 365, 367, 369, 371, 373, 375, 377, 379, 381, 383, 385, 387, 389, 391, 393, 395, 397, 399, 401, 403, 405, 407, 409, 411, 413, 415, 417, 419, 421, 423, 425, 427, 429, 431, 433, 435, 437, 439, 441, 443, 445, 447, 449, 451, 453, 455, 457, 459, 461, 463, 465, 467, 469, 471, 473, 475, 477, 479, 481, 483, 485, 487, 489, 491, 493, 495, 497, 499, 501, 503, 507, 509, 511, 513, 515, 517, 519, 521, 523, 525, or a sequence encoding a CDR that differs by one or two amino acids from the CDR sequences set forth herein. In some embodiments, the nucleic acid encodes an anti-ErbB2 binding protein comprising one, two, or all 3 heavy chain CDRs, one, two or all 3 light chain CDRs or all 6 CDRS in any of an specifically exemplified antibody.

[0171] The nucleic acid can encode only the light chain or the heavy chain variable region, or can also encode an antibody light or heavy chain constant region, operatively linked to the corresponding variable region. In one embodiment, the light chain variable region is linked to a constant region chosen from a kappa or a lambda constant region. The light chain constant region may also be a human kappa or lambda type. In another embodiment, the heavy chain variable region is linked to a heavy chain constant region of an antibody isotype chosen from IgG (e.g., IgG₁, IgG₂, IgG₃, IgG₄), IgM, IgA₁, IgA₂, IgD, and IgE. The heavy chain constant region may be an IgG (e.g., an IgG₁) isotype.

[0172] The nucleic acid compositions of the present invention, while often in the native sequence (of cDNA or genomic DNA or mixtures thereof) except for modified restriction sites and the like, may be mutated in accordance with standard techniques to provide gene sequences. For coding sequences, these mutations, may affect amino acid sequence as desired. In particular, nucleotide sequences substantially identical to or derived from native V, D, J, constant, switches and other such sequences described herein are contemplated (where “derived” indicates that a sequence is identical or modified from another sequence).

[0173] In one embodiment, the nucleic acid differs (e.g., differs by substitution, insertion, or deletion) from that of the sequences provided (e.g., as follows: by at least one but less than 10, 20, 30, or 40 nucleotides; at least one but less than 1%, 5%, 10% or 20% of the nucleotides in the subject nucleic acid). Also within the invention are ErbB2 binding proteins encoded by a nucleic acid that hybridizes under stringent conditions to a nucleic acid specifically exemplified herein or to its complement. If necessary for this analysis the sequences should be aligned for maximum homology. “Looped out” sequences from deletions or insertions, or mismatches, are considered differences. The difference may be at a nucleotide(s) encoding a non-essential residue(s), or the difference may be a conservative substitution(s).

[0174] The invention also provides nucleic acid constructs in the form of plasmids, vectors, transcription or expression cassettes, that comprise at least one nucleic acid as described herein as well as a host cell that comprises at least one nucleic acid described herein. Suitable host cells for the expression of a binding protein of the invention well be well known in the art and include mammalian, plant, insects, bacterial or yeast cells.

[0175] Also provided are the methods of making an anti-ErbB2 antibody of the invention that is encoded by the nucleic acid(s) comprising sequence described herein. The method comprises culturing host cells under appropriate conditions to express the protein from the nucleic acid. Following expression and production, the encoded pp may be isolated and/or purified using any suitable technique, then used as appropriate. The method can also include the steps of fusing a nucleic acid encoding a scFv with nucleic acids encoding a Fc portion of an antibody and expressing the fused nucleic acid in a cell. The method can also include a step of germlining.

[0176] Antigen-binding fragments, V_{H} and/or V_{L} domains, and encoding nucleic acid molecules and vectors may be isolated and/or purified from their natural environment, in substantially pure or homogenous form, or, in the case of nucleic acid, free or substantially free of nucleic acid or genes of origin other than the sequence encoding a polypeptide with the require function.

[0177] Systems for cloning and expressing polypeptides in a variety of host cells are known in the art. Cells suitable for producing antibodies are described in, for example, Fernandez et al. (1999) Gene Expression Systems, Academic Press, eds. In brief, suitable host cells include mammalian cells, insect cells, plant cells, yeast cells, or prokaryotic cells, e.g., E. coli. Mammalian cells available in the art for heterologous polypeptide expression include lymphocytic cell lines (e.g., NSD), HEK293 cells, Chinese hamster ovary (CHO) cells, COS cells, HeLa cells, baby hamster kidney cells, oocyte cells, and cells from a transgenic animal, e.g., mammary epithelial cell.

[0178] In one embodiment, all or a portion of an anti-ErbB2 antibody selected from S1R2A_CS_{—}1F7, S1R2A_CS_{—}1D11, S1R2C_CS_{—}1D3, S1R2C_CS_{—}1H12, S1R2A_CS_{—}1D3, S1R3B2_BMV_{—}1E1, S1R3C1_CS_{—}1D3, S1R3B2_DP47_{—}1E8, S1R3B2_BMV_{—}1G2, S1R3B2_BMV_{—}1H5, S1R3C1_CS_{—}1A6, S1R3B2_DP47_{—}1C9, S1R3B2_DP47_{—}1E10, S1R3C1_CS_{—}1B10, S1R3A1_BMV_{—}1F3, S1R3B1_BMV_{—}1G11, S1R3A1_BMV_{—}1G4, S1R3B1_BMV_{—}1H11, S1R3A1_CS_{—}1B9, S1R3B1_BMV_{—}1H9, S1R3A1_CS_{—}1B10, S1R3B1_BMV_{—}1C12, S1R3C1BMV_{—}1H11, S1R3B1_BMV_{—}1A10, S1R3A1_CS_{—}1D11, S1R3C1_DP47_{—}1H1, S1R3A1_CS_{—}1B12, S1R3B1_BMV_{—}1H5, S1R3A1_DP47_{—}1A6, S1R3B1_DP47_{—}1E1, S1R3B1_BMV_{—}1A1, S1R3B1_DP47_{—}3A2, S1R3A1_DP47_{—}11B7, S1R3A1_DP47_{—}11D1, S1R3A1_DP47_{—}7F3, S1R2B_DP47_{—}4E3, S1R3C1_DP47_{—}2G2, S1R3A1_DP47_{—}11H6, S1R3A1_BMV_{—}3B1, S1R3A1_DP47_{—}6B9, S1R2A_CS_{—}10B8, S1R3A1_DP47_{—}7A6, S1R3B2_DP47_{—}2G3, S1R2B_CS_{—}6H11, S1R3A1_DP47_{—}10G1, S1R3A1_DP47_{—}7C1, S1R2A_DP47_{—}5D6, S1R3A1_DP47_{—}11F6, S1R3A1_DP47_{—}11D3, S1R3A1_CS_{—}8A8, S1R3A1_BMV_{—}5D10, S1R3A1_DP47_{—}11C1, S1R3A1_DP47_{—}4E1, S1R3A1_DP47_{—}10E1, S1R3A1_CS_{—}11C3, S1R3A1_CS_{—}13H11, S1R3A1_CS_{—}2D9, S1R2A_CS_{—}3D4, S1R3A1_DP47_{—}2H6, S1R3A1_DP47_{—}4G1, S1R2A_DP47_{—}3C1, S1R3A1_DP47_{—}7B2, S1R3B2_DP47_{—}4E2, S1R3A1_CS_{—}16C2, S1R3A1_CS_{—}11E5, S1R3A1_CS_{—}16D7, S1R2A_CS_{—}10B10, S1R3A1_CS_{—}15C2, S1R3A1_CS_{—}9C1, S1R2A_CS_{—}5A1, S1R2A_CS_{—}8C8, S1R3A1_CS_{—}13H5, S1R2B_CS_{—}5E9, S1R3A1_CS_{—}8F9, S1R3A1_CS_{—}14B5, S1R2A_CS_{—}9E10, S1R3A1_CS_{—}7A10, S1R3A1_BMV_{—}6H7, S1R3A1_CS_{—}12A11, S1R3A1_CS_{—}13D12, S1R3A1_CS_{—}7A8, S1R2A_CS_{—}2C9, S1R3A1_CS_{—}12D1, S1R2A_CS_{—}7D4, S1R3A1_CS_{—}15B8, S6R3_DP47_{—}1A10, S6R2_DP47_{—}1E11, S5R2_DP47_{—}1H11, S6R3_CS_{—}1G5, S6R2_DP47_{—}1H11, S5R3_DP47_{—}1A10, S5R2_DP47_{—}1D11, S5R2_CS_{—}1A8, S6R3_CS_{—}1B7, S6R2_CS_{—}1E5, S6R3_BMV_{—}1C2, S5R2_DP47_{—}1B10, S6R3_DP47_{—}1C12, S5R2_DP47_{—}1D10, and S6R3_DP47_{—}1H9 is expressed in HEK293 or CHO cells. In other embodiments, one or more nucleic acids encoding an anti-ErbB2 binding protein of the invention are placed under the control of a tissue-specific promoter (e.g., a mammary specific promoter) and the antibodies are produced in transgenic animals. For example, the antibodies are secreted into the milk of the transgenic animal, such as a transgenic cow, pig, horse, sheep, goat or rodent.

[0179] Suitable vectors may be chosen or constructed to contain appropriate regulatory sequences, including promoter sequences, terminator sequences, polyadenylation sequences, enhancer sequences, marker genes, and other sequences. The vectors may also contain a plasmid or viral backbone. For details, see Sambrook et al., Molecular Cloning: A Laboratory Manual, 2nd ed., Cold Spring Harbor Laboratory Press (1989). Many established techniques used with vectors, including the manipulation, preparation, mutagenesis, sequencing, and transfection of DNA, are described in Current Protocols in Molecular Biology, Second Edition, Ausubel et al. eds., John Wiley & Sons (1992).

[0180] A nucleic acid encoding all or]part of an anti-ErbB2 binding protein of the invention may be introduced into a host cell by any readily available means. For eukaryotic cells, suitable transfection techniques may include calcium phosphate, DEAE-Dextran, electroporation, liposome-mediated transfection, and transduction using retrovirus or other viruses, e.g., vaccinia or baculovirus. For bacterial cells, suitable techniques may include calcium chloride transformation, electroporation, and transfection using bacteriophage. DNA introduction may be followed by a selection method (e.g., drug resistance) to select cells that contain the nucleic acid.

### IV. Therapeutic Uses of Anti-ErbB2 Binding Proteins

[0181] Anti-ErbB2 binding proteins of the invention may be ErbB2 agonists or antagonists. An agonist ErbB2 binder of the invention increases HER2 tyrosine phosphorylation in the absence or presence of other HER2 agonists such as Heregulin or Epidermal Growth Factor (EGF). Certain HER2 agonists of the invention increase phosphorylation of HER2 pathway proteins. In some embodiments, the agonist of the invention increase phosphorylation of AKT, MAPK and/or ERK. In some embodiments, the HER2 agonist of the invention decreases proliferation and/or increases cell death of a cancer cell, in vitro and in vivo.

[0182] Anti-ErbB2 binding proteins that act as antagonists to ErbB2 can be used to reduce at least one ErbB2-mediated activity, such as reducing ErbB2-mediated tyrosine phosphorylation, decreased heterodimerization of ErbB2 with other ERBB-family members, decreased ErbB2-mediated cell signalling and decreased growth or proliferation of ErbB2-expressing cells. In one embodiment, anti-ErbB2 binding proteins of the invention are used in a method for decreasing tumor growth, the method comprising contacting an ErbB2 expressing cell with a binding protein of the invention to modulate cell proliferation, cytolytic activity, cytokine secretion, or chemokine secretion.

[0183] Accordingly, the binding proteins of the invention can be used to directly or indirectly inhibit or reduce the activity (e.g., proliferation, differentiation, and/or survival) of cells expressing ErbB2, and, thus, can be used to treat a variety of disorders including hyperproliferative disorders.

[0184] The binding proteins of the invention can be used to treat hyperproliferative disorders associated with activity of ErbB2 by administering the antibodies in an amount sufficient to inhibit or reduce hyperproliferation and/or to increase cell death, such as by apoplosis of ErbB2 expressing cells in a subject and allowing the antibodies to treat or prevent the disorder. ErbB2 is expressed in a number of cancers including, but not limited to, breast, bladder, cervical, ovarian, prostate, testicular, oral, colorectal, lung and pancreatic, cancers and in childhood medulloblastoma, oral squamous cell carcinoma, gastric cancer cholangio carcinoma, osteosarcoma, primary Fallopian tube carcinoma, salivary gland tumors and synovial sarcoma. Binding proteins of the invention may be used to inhibit the progression of neoplasms, e.g. squamous cell carcinomas, basal cell carcinomas, transitional cell papillomas and carcinomas, adenomas, adenocarcinoma. According to the invention, an anti-ErbB2 binding protein of the invention can be administered to a subject in need thereof as part of a regimen that comprises another therapeutic modality, such as surgery or radiation.

### V. Combination Therapy

[0185] According to the invention, a composition suitable for pharmaceutical use comprising at least one anti-ErbB2 binding protein further comprises at least one additional therapeutic agent. The therapy is useful for treating ErbB2-mediated pathological conditions or disorders including cancer. The term “in combination” in this context means that the binding protein composition and the additional therapeutic agent are given as part of a treatment regimen. In some embodiments, the anti-ErbB2 binding protein is administered substantially contemporaneously, either simultaneously or sequentially with another therapeutic agent, including one being a pretreatment in relation to the other. In some embodiments, in which administration is sequential, at the onset of administration of the second agent, the first of the two agents is still detectable at effective concentrations at the site of treatment. In another embodiment, if given sequentially, at the onset of administration of the second compound, the first of the two compounds is not detectable at effective concentrations at the site of treatment.

[0186] According to the invention, a treatment regimen may comprise two or more anti-ErbB2 antibodies of the invention. The binding molecules may be ones that bind the same or nearby regions of HER2, as illustrated for example by blocking or cross-blocking each other's binding to HER2, or they may bind to different regions of HER2, as shown by lack of cross-blocking. Two or more anti-ErbB2 binding molecules of the invention may be co-formulated, co-administered or merely be part of the same treatment regimen.

[0187] For example, the combination therapy can include at least one anti-ErbB2 binding protein of the invention co-formulated with, co-administered with, or administered as part of the same therapeutic regimen as at least one additional therapeutic agent. The additional agents may include at least but is not limited to mitotic inhibitors, alkylating agents, anti-metabolites, intercalating antibiotics, growth factor inhibitors, cell cycle inhibitors, enzymes, topoisomerase inhibitors, biological response modifiers, antibodies, cytotoxics, antiproliferative agents, kinase inhibitors, angiogenesis inhibitors, growth factor inhibitors, cox-I inhibitors, cox-II inhibitors, radiation, cell cycle inhibitors, enzymes, anti-hormones, statins, and anti-androgens.

[0188] In other embodiments, at least one anti-ErbB2 binding protein can be co-formulated with, and/or co-administered with, at least one anti-inflammatory drug, immunosuppressant, metabolic inhibitor, and enzymatic inhibitor.

[0189] In other embodiments, an anti-ErbB2 antibody can be used in combination with at least one binding protein, such as an antibody, directed at other cancer targets. Another aspect of the present invention accordingly relates to kits for carrying out the administration of the anti-ErbB2 binding protein alone or in combination with other therapeutic agents. In one embodiment, the kit comprises at least one anti-ErbB2 binding protein formulated in a pharmaceutical carrier, and at least one additional therapeutic agent, formulated as appropriate in one or more separate pharmaceutical preparations.

[0190] In one embodiment, the present inventive binding proteins can be administered in combination with (e.g., prior to, concurrently with, or subsequent to) one or more other therapeutic agents. Such therapeutic agents include, for example, cytotoxic agents that inhibit or prevent the function of cells and/or causes destruction of cells. The term is intended to include radioactive isotopes (e.g. I131, I125, Y90 and Re186), chemotherapeutic agents, growth inhibitory agents, cytokine, and toxins such as enzymatically active toxins of bacterial, fungal, plant or animal origin, or fragments thereof.

[0191] Examples of chemotherapeutic agents include alkylating agents such as thiotepa and cyclosphosphamide (CYTOXAN™); alkyl sulfonates such as busulfan, improsulfan and piposulfan; aziridines such as benzodopa, carboquone, meturedopa, and uredopa; ethylenimines and methylamelamines including altretamine, triethylenemelamine, trietylenephosphoramide, triethylenethiophosphaoramide and trimethylolomelamine; nitrogen mustards such as chlorambucil, chlornaphazine, cholophosphamide, estramustine, ifosfamide, mechlorethamine, mechlorethamine oxide hydrochloride, melphalan, novembichin, phenesterine, prednimustine, trofosfamide, uracil mustard; nitrosureas such as carmustine, chlorozotocin, fotemustine, lomustine, nimustine, ranimustine; antibiotics such as aclacinomysins, actinomycin, authramycin, azaserine, bleomycins, cactinomycin, calicheamicin, carabicin, caminomycin, carzinophilin, chromomycins, dactinomycin, daunorubicin, detorubicin, 6-diazo-5-oxo-L-norleucine, doxorubicin, epirubicin, esorubicin, idarubicin, marcellomycin, mitomycins, mycophenolic acid, nogalamycin, olivomycins, peplomycin, potfiromycin, puromycin, quelamycin, rodorubicin, streptonigrin, streptozocin, tubercidin, ubenimex, zinostatin, zorubicin; anti-metabolites such as methotrexate and 5-fluorouracil (5-FU); folic acid analogues such as denopterin, methotrexate, pteropterin, trimetrexate; purine analogs such as fludarabine, 6-mercaptopurine, thiamiprine, thioguanine; pyrimidine analogs such as ancitabine, azacitidine, 6-azauridine, carmofur, cytarabine, dideoxyuridine, doxifluridine, enocitabine, floxuridine, 5-FU; androgens such as calusterone, dromostanolone propionate, epitiostanol, mepitiostane, testolactone; anti-adrenals such as aminoglutethimide, mitotane, trilostane; folic acid replenisher such as frolinic acid; aceglatone; aldophosphamide glycoside; aminolevulinic acid; amsacrine; bestrabucil; bisantrene; edatraxate; defofamine; demecolcine; diaziquone; elformithine; elliptinium acetate; etoglucid; gallium nitrate; hydroxyurea; lentinan; lonidamine; mitoguazone; mitoxantrone; mopidamol; nitracrine; pentostatin; phenamet; pirarubicin; podophyllinic acid; 2-ethylhydrazide; procarbazine; PSK®; razoxane; sizofiran; spirogermanium; tenuazonic acid; triaziquone; 2,2′,2″-trichlorotriethylamine; urethan; vindesine; dacarbazine; mannomustine; mitobronitol; mitolactol; pipobroman; gacytosine; arabinoside (“Ara-C”); cyclophosphamide; thiotepa; taxanes, e.g. paclitaxel (TAXOL®, Bristol-Myers Squibb Oncology, Princeton, N.J.) and docetaxel (TAXOTERE®, Rhône-Poulenc Rorer, Antony, France); chlorambucil; gemcitabine; 6-thioguanine; mercaptopurine; methotrexate; platinum analogs such as cisplatin and carboplatin; vinblastine; platinum; etoposide (VP-16); ifosfamide; mitomycin C; mitoxantrone; vincristine; vinorelbine; navelbine; novantrone; teniposide; daunomycin; aminopterin; xeloda; ibandronate; CPT-11; topoisomerase inhibitor RFS 2000; difluoromethylomithine (DMFO); retinoic acid; esperamicins; capecitabine; and pharmaceutically acceptable salts, acids or derivatives of any of the above. Also included are anti-hormonal agents that act to regulate or inhibit hormone action on tumors such as anti-estrogens including for example tamoxifen, raloxifene, aromatase inhibiting 4(5)-imidazoles, 4-hydroxytamoxifen, trioxifene, keoxifene, LY117018, onapristone, and toremifene (Fareston); and anti-androgens such as flutamide, nilutamide, bicalutamide, leuprolide, and goserelin; and pharmaceutically acceptable salts, acids or derivatives of any of the above.

[0192] A growth inhibitory agent when used herein refers to a compound or composition that inhibits growth of a cell, especially an ErbB2-overexpressing cancer cell either in vitro or in vivo. In the context of the present invention, the growth inhibitory agent can be one that significantly reduces the percentage of ErbB2 overexpressing cells in S phase and the binding proteins of the present invention may potentially sensitize the cells to such an S phase agent. S-phase blockers include the vincas (vincristine and vinblastine), taxol, and topo II inhibitors such as doxorubicin, daunorubicin, etoposide, and bleomycin. Examples of growth inhibitory agents include agents that block cell cycle progression (at a place other than S phase), include agents that induce G1 arrest and M-phase arrest. Those agents that arrest G1 also spill over into S-phase arrest, for example, DNA alkylating agents such as tamoxifen, prednisone, dacarbazine, mechlorethamine, cisplatin, methotrexate, 5-fluorouracil, and ara-C. Further information can be found in The Molecular Basis of Cancer, Mendelsohn and Israel, eds., Chapter 1, entitled “Cell cycle regulation, oncogens, and antineoplastic drugs” by Murakami et al. (WB Saunders: Philadelphia, 1995), especially p. 13.

[0193] Examples of such cytokines are lymphokines, monokines, and traditional polypeptide hormones. Included among the cytokines are growth hormone such as human growth hormone, N-methionyl human growth hormone, and bovine growth hormone; parathyroid hormone; thyroxine; insulin; proinsulin; relaxin; prorelaxin; glycoprotein hormones such as follicle stimulating hormone (FSH), thyroid stimulating hormone (TSH), and luteinizing hormone (LH); hepatic growth factor, fibroblast growth factor; prolactin; placental lactogen; tumor necrosis factor-α and -β; mullerian-inhibiting substance; mouse gonadotropin-associated peptide; inhibin; activin; vascular endothelial growth factor; integrin; thrombopoietin (TPO); nerve growth factors such as NGF-β; platelet-growth factor; transforming growth factors (TGFs) such as TGF-α and TGF-β; insulin-like growth factor-I and -II; erythropoietin (EPO); osteoinductive factors; interferons such as interferon-α, -β, and -γ; colony stimulating factors (CSFs) such as macrophage-CSF (M-CSF); granulocyte-macrophage-CSF (GM-CSF); and granulocyte-CSF (G-CSF); interleukins (ILs) such as IL-1, IL-1α, IL-2, IL-3, IL-4, IL-5, IL-6, IL-7, IL-8, IL-9, IL-11, IL-12; a tumor necrosis factor such as TNF-α or TNF-β; and other polypeptide factors including LIF and kit ligand (KL). As used herein, the term cytokine includes proteins from natural sources or from recombinant cell culture and biologically active equivalents of the native sequence cytokines.

[0194] The invention also pertains to immunoconjugates comprising the binding proteins described herein conjugated to a cytotoxic agent such as a chemotherapeutic agent, toxin (e.g. an enzymatically active toxin of bacterial, fungal, plant or animal origin, or fragments thereof), or a radioactive isotope (i.e., a radioconjugate). Such immunconjugates are particularly indicated for those binding proteins of the invention that internalize in Her2 expressing cells, as shown in the Examples section.

[0195] Chemotherapeutic agents useful in the generation of such immunoconjugates have been described above. Enzymatically active toxins and fragments thereof which can be used include diphtheria A chain, nonbinding active fragments of diphtheria toxin, exotoxin A chain (from Pseudomonas aeruginosa), ricin A chain, abrin A chain, modeccin A chain, alpha-sarcin, Aleurites fordii proteins, dianthin proteins, Phytolaca americana proteins (PAPI, PAPII, and PAP-S), momordica charantia inhibitor, curcin, crotin, sapaonaria officinalis inhibitor, gelonin, mitogellin, restrictocin, phenomycin, enomycin and the tricothecenes. A variety of radionuclides are available for the production of radioconjugated anti-ErbB2 binding proteins. Examples include 212Bi, 131I, 131In, 90 Y and 186Re.

[0196] Immunoconjugates comprising a member of the potent family of antibacterial and antitumor agents, known collectively as the calicheamicins or the LL-E33288 complex, (see U.S. Pat. No. 4,970,198 (1990)) are also contemplated. The most potent of the calicheamicins is designated γ 1, which is herein referenced simply as gamma. These compounds contain a methyltrisulfide that can be reacted with appropriate thiols to form disulfides, at the same time introducing a functional group such as a hydrazide or other functional group that is useful in attaching a calicheamicin derivative to a carrier. (See U.S. Pat. No. 5,053,394). Conjugation methods for preparing monomeric calicheamicin derivative/carrier have been disclosed (see U.S. Pat. No. 5,712,374 and U.S. Pat. No. 5,714,586, incorporated herein in their entirety).

[0197] Conjugates of the binding protein and cytotoxic agent can be made using a variety of bifunctional protein coupling agents such as N-succinimidyl-3-(2-pyridyldithiol) propionate (SPDP), iminothiolane (IT), bifunctional derivatives of imidoesters (such as dimethyl adipimidate HCL), active esters (such as disuccinimidyl suberate), aldehydes (such as glutareldehyde), bis-azido compounds (such as bis (p-azidobenzoyl) hexanediamine), bis-diazonium derivatives (such as bis-(p-diazoniumbenzoyl)-ethylenediamine), diisocyanates (such as tolyene 2,6-diisocyanate), and bis-active fluorine compounds (such as 1,5-difluoro-2,4-dinitrobenzene). For example, a ricin immunotoxin can be prepared as described in Vitetta et al. Science 238: 1098 (1987). Carbon-14-labeled 1-isothiocyanatobenzyl-3-methyldiethylene triaminepentaacetic acid (MX-DTPA) is an exemplary chelating agent for conjugation of radionucleotide to the binding protein.

[0198] Effective amounts of the other therapeutic agents are well known to those skilled in the art. However, it is well within the skilled artisan's purview to determine the other therapeutic agent's optimal effective amount range. The binding proteins of the present invention and the other therapeutic agent(s) can act additively or, alternatively, synergistically. In one embodiment of the invention, where another therapeutic agent(s) is administered to an animal, either the effective amount of the binding protein of the present invention or the other therapeutic agent(s) can be administered in an amount that is less than its effective amount would be where the other therapeutic agent is not administered. In this case, without being bound by theory, it is believed that the two (or more) act synergistically.

### VI. Diagnostic Uses

[0199] In a further aspect, a binding protein of the invention may also be used to detect the presence of ErbB2 or ErbB2 expressing cells in a biological sample. By correlating the presence or level of ErbB2 with a medical condition, one of skill in the art can diagnose the associated medical condition, including cancer.

[0200] Binding protein-based, including antibody-based detection methods are well known in the art, and include ELISA, radioimmunoassays, immunoblots, Western blots, flow cytometry, immunofluorescence, immunoprecipitation, and other related techniques. The antibodies may be provided in a diagnostic kit that incorporates at least one of these procedures to detect ErbB2. The kit may contain other components, packaging, instructions, or other material to aid the detection of the protein and use of the kit.

[0201] Binding proteins of the invention may be modified with detectable markers, including ligand groups (e.g., biotin), fluorophores and chromophores, radioisotopes, electron-dense reagents, or enzymes. Enzymes are detected by their activity. For example, horseradish peroxidase is detected by its ability to convert tetramethylbenzidine (TMB) to a blue pigment, quantifiable with a spectrophotometer. Other suitable binding partners include biotin and avidin, IgG and protein A, and other receptor-ligand pairs known in the art.

[0202] Binding proteins of the invention can also be functionally linked (e.g., by chemical coupling, genetic fusion, non-covalent association or otherwise) to at least one other molecular entity, such as another antibody (e.g., a bispecific or a multispecific antibody), toxins, radioisotopes, cytotoxic or cytostatic agents, among others for therapeutic use. Other permutations and possibilities are apparent to those of ordinary skill in the art, and they are considered equivalents within the scope of this invention.

[0203] Further, the anti-ERRB2 binding proteins can be used to detect the presence, isolate, and/or to quantitate ErbB2-expressing cells in a sample from a subject or by in vivo imaging.

### VII. Pharmaceutical Compositions and Methods of Administration

[0204] In still another aspect, the invention provides compositions comprising an anti-ErbB2 binding protein of the invention. The compositions may be suitable for pharmaceutical use and administration to patients. The compositions comprise a binding protein of the present invention and a pharmaceutically acceptable carrier. The composition may optionally comprise a pharmaceutical excipient. As used herein, “pharmaceutical excipient” includes solvents, dispersion media, coatings, antibacterial and antifungal agents, isotonic and absorption delaying agents, etc., that are compatible with pharmaceutical administration. Use of these agents for pharmaceutically active substances is well known in the art. The compositions may also contain other active compounds providing supplemental, additional, or enhanced therapeutic functions. The pharmaceutical compositions may also be included in a container, pack, or dispenser together with instructions for administration.

[0205] A pharmaceutical composition of the invention is formulated to be compatible with its intended route of administration. Methods to accomplish the administration are known to those of ordinary skill in the art. Pharmaceutical compositions may be topically or orally administered, or capable of transmission across mucous membranes. Examples of administration of a pharmaceutical composition include oral ingestion or inhalation. Administration may also be intravenous, intraperitoneal, intramuscular, intracavity, subcutaneous, cutaneous, or transdermal.

[0206] Solutions or suspensions used for intradermal or subcutaneous application typically include at least one of the following components: a sterile diluent such as water, saline solution, fixed oils, polyethylene glycol, glycerine, propylene glycol, or other synthetic solvent; antibacterial agents such as benzyl alcohol or methyl parabens; antioxidants such as ascorbic acid or sodium bisulfite; chelating agents such as ethylenediaminetetraacetic acid (EDTA); buffers such as acetate, citrate, or phosphate; and tonicity agents such as sodium chloride or dextrose. The pH can be adjusted with acids or bases. Such preparations may be enclosed in ampoules, disposable syringes, or multiple dose vials.

[0207] Solutions or suspensions used for intravenous administration include a carrier such as physiological saline, bacteriostatic water, Cremophor EL™ (BASF, Parsippany, N.J.), ethanol, or polyol. In all cases, the composition must be sterile and fluid for easy syringability. Proper fluidity can often be obtained using lecithin or surfactants. The composition must also be stable under the conditions of manufacture and storage. Prevention of microorganisms can be achieved with antibacterial and antifungal agents, e.g., parabens, chlorobutanol, phenol, ascorbic acid, thimerosal, etc. In many cases, isotonic agents (sugar), polyalcohols (mannitol and sorbitol), or sodium chloride may be included in the composition. Prolonged absorption of the composition can be accomplished by adding an agent that delays absorption, e.g., aluminum monostearate and gelatin.

[0208] Oral compositions include an inert diluent or edible carrier. The composition can be enclosed in gelatin or compressed into tablets. For the purpose of oral administration, the antibodies can be incorporated with excipients and placed in tablets, troches, or capsules. Pharmaceutically compatible binding agents or adjuvant materials can be included in the composition. The tablets, troches, and capsules, may contain (1) a binder such as microcrystalline cellulose, gum tragacanth or gelatin; (2) an excipient such as starch or lactose, (3) a disintegrating agent such as alginic acid, Primogel, or corn starch; (4) a lubricant such as magnesium stearate; (5) a glidant such as colloidal silicon dioxide; or (6) a sweetening agent or a flavoring agent.

[0209] The composition may also be administered by a transmucosal or transdermal route. For example, antibodies that comprise a Fc portion may be capable of crossing mucous membranes in the intestine, mouth, or lungs (via Fc receptors). Transmucosal administration can be accomplished through the use of lozenges, nasal sprays, inhalers, or suppositories. Transdermal administration can also be accomplished through the use of a composition containing ointments, salves, gels, or creams known in the art. For transmucosal or transdermal administration, penetrants appropriate to the barrier to be permeated are used. For administration by inhalation, the antibodies are delivered in an aerosol spray from a pressured container or dispenser, that contains a propellant (e.g., liquid or gas) or a nebulizer.

[0210] In certain embodiments, the binding proteins of this invention are prepared with carriers to protect against rapid elimination from the body. Biodegradable polymers (e.g., ethylene vinyl acetate, polyanhydrides, polyglycolic acid, collagen, polyorthoesters, polylactic acid) are often used. Methods for the preparation of such formulations are known by those skilled in the art. Liposomal suspensions can be used as pharmaceutically acceptable carriers too. The liposomes can be prepared according to established methods known in the art (U.S. Pat. No. 4,522,811).

[0211] The binding proteins or compositions of the invention are administered in therapeutically effective amounts as described. Therapeutically effective amounts may vary with the subject's age, condition, sex, and severity of medical condition. Appropriate dosage may be determined by a physician based on clinical indications. The binding proteins or compositions may be given as a bolus dose to maximize the circulating levels of protein for the greatest length of time. Continuous infusion may also be used after the bolus dose.

[0212] As used herein, the term “subject” is intended to include human and non-human animals. Subjects may include a human patient having a disorder characterized by cells that express ErbB2, e.g., a cancer cell or an immune cell. The term “non-human animals” of the invention includes all vertebrates, such as non-human primates, sheep, dogs, cows, chickens, amphibians, reptiles, etc.

[0213] Examples of dosage ranges that can be administered to a subject can be chosen from: 1 μg/kg to 20 mg/kg, 1 μg/kg to 10 mg/kg, 1 μg/kg to 1 mg/kg, 10 μg/kg to 1 mg/kg, 10 μg/kg to 100 μg/kg, 100 μg/kg to 1 mg/kg, 250 μg/kg to 2 mg/kg, 250 μg/kg to 1 mg/kg, 500 μg/kg to 2 mg/kg, 500 μg/kg to 1 mg/kg, 1 mg/kg to 2 mg/kg, 1 mg/kg to 5 mg/kg, 5 mg/kg to 10 mg/kg, 10 mg/kg to 20 mg/kg, 15 mg/kg to 20 mg/kg, 10 mg/kg to 25 mg/kg, 15 mg/kg to 25 mg/kg, 20 mg/kg to 25 mg/kg, and 20 mg/kg to 30 mg/kg (or higher). These dosages may be administered daily, weekly, biweekly, monthly, or less frequently, for example, biannually, depending on dosage, method of administration, disorder or symptom(s) to be treated, and individual subject characteristics. Dosages can also be administered via continuous infusion (such as through a pump). The administered dose may also depend on the route of administration. For example, subcutaneous administration may require a higher dosage than intravenous administration.

[0214] In certain circumstances it may be advantageous to formulate compositions in dosage unit form for ease of administration and uniformity of dosage. Dosage unit form as used herein refers to physically discrete units suited for the patient. Each dosage unit contains a predetermined quantity of antibody calculated to produce a therapeutic effect in association with the carrier. The dosage unit depends on the characteristics of the antibodies and the particular therapeutic effect to be achieved.

[0215] Toxicity and therapeutic efficacy of the composition can be determined by standard pharmaceutical procedures in cell cultures or experimental animals, e.g., determining the LD₅₀ (the dose lethal to 50% of the population) and the ED₅₀ (the dose therapeutically effective in 50% of the population). The dose ratio between toxic and therapeutic effects is the therapeutic index and it can be expressed as the ratio LD₅₀/ED₅₀. Binding proteins that exhibit large therapeutic indices may be less toxic and/or more therapeutically effective.

[0216] The data obtained from the cell culture assays and animal studies can be used to formulate a dosage range in humans. The dosage of these compounds may lie within the range of circulating antibody concentrations in the blood, that includes an ED₅₀ with little or no toxicity. The dosage may vary within this range depending upon the dosage composition form employed and the route of administration. For any antibody used in the present invention, the therapeutically effective dose can be estimated initially using cell culture assays. A dose may be formulated in animal models to achieve a circulating plasma concentration range that includes the IC₅₀ (i.e., the concentration of antibody that achieves a half-maximal inhibition of symptoms). The effects of any particular dosage can be monitored by a suitable bioassay. Examples of suitable bioassays include DNA replication assays, transcription-based assays and ErbB2 binding assays.

### EXAMPLES

### Example 1

### Selection of Anti-ErbB2 scFv's

[0217] Single chain fragment variable (scFv) moieties that bind to the extracellular domain (ECD) of Her2 (ErbB2) were identified following three rounds of selection using three phagemid libraries: the Bone Marrow Vaughan (BMV) library (Vaughan et al, 1996), the combined spleen (CS) library and the DP47 library (unpublished). Several Her2-Fc proteins or cell lines expressing various forms of Her2 were used during the selection and subsequent screening steps (see Table 3). The selection strategies are outlined in FIG. 1.

[0218] Selection Using Biotinylated HER2 Proteins

[0219] For selections involving biotinylated protein, aliquots of phage and magnetic streptavidin beads (Dynabeads M-280 streptavidin) were blocked separately in 3% milk/PBS for 1 hour at room temperature in a rotary mixer (20 rpm). Each selection was preceded by a de-selection step. For de-selection, blocked phage were incubated with the pre-blocked magnetic beads and incubated for one hour on a rotary shaker (20 rpm). The de-selected library was collected by pelleting the beads using a magnetic separator. A 1 μM concentration of a non-biotinylated competitor protein (eg, irrelevant MlgG2a protein) was added to the de-selected phage and incubated for a further hour.

[0220] Biotinylated selection antigen (at various concentrations as indicated in FIG. 1) was incubated with the de-selected phage library for 2 hours at room temp on a rotary mixer (20 rpm) followed by a 15 minute incubation with pre-blocked magnetic beads. Beads were separated using a magnetic separator and washed 10 times with PBS/0.1% Tween 20 and 3 times with PBS. Bound phage were eluted by incubation with a 10 ug/ml solution of trypsin in PBS for 30 minutes at 37° C. (100 rpm) followed by separation from the magnetic beads.

[0221] Selection Using Cells Expressing HER2ECD or ECD Fragments

[0222] For selections involving cells, approximately 4×10⁷ de-selection cells (ie. cells not expressing the antigen of interest) and 2×10⁷ capture (i.e., selection) cells (cells expressing the antigen of interest) were collected using PBS/5 mM EDTA and washed twice with PBS. Cells were blocked with 3% milk/1% BSA/PBS for 1 hour at 4° C. on a rotary mixer (20 rpm). De-selection cells were collected by centrifugation, re-suspended in blocked phage and incubated at 4° C. as before. Both the capture and de-selection cells were pelleted and the capture cells were resuspended with the de-selected phage supernatant and incubated at 4° C. as before. The capture cells were washed three times with cold PBS/0.1% Tween 20 and three times with cold PBS. Phage were eluted by re-suspending the cells in a 10 μg/ml trypsin solution and incubated for 30 min at 37° C. (100 rpm). Eluted phage were harvested in the supernatant following centrifugation of cells. Eluted phage were used to infect 10 ml of an E. coli TG1 culture that had been grown to mid-logarithmic phase (corresponding to an OD₆₀₀ of ˜0.5). Bacteria were infected with phage for 1 hour at 37° C. with shaking at 150 rpm, concentrated following a centrifugation step and plated on 2×TY agar bioassay plates containing 2% glucose and 100 ug/ml ampicillin (2×TYAG). Various dilutions of E. coli culture infected with either input or output phage were also plated on 2×TYAG agar to determine phage titers. Following overnight growth at 30° C., 10 ml of 2×TYAG medium was added to each bioassay plate and the cells were re-suspended by scraping the bacterial lawn. Glycerol was added to this cell suspension to give a final concentration of 17% and stored in aliquots at −80° C. until further use. To rescue phage for the next round of selection, 100 μl of this cell suspension was used to inoculate 20 ml 2×TYAG medium, that was grown at 37° C. (300 rpm) to an OD₆₀₀ of 0.3-0.5. Cells were then super-infected with 3.3 μl of MK13K07 helper phage and incubated at 37° C. (150 rpm) for 1 hour. The cells were then centrifuged and the pellet re-suspended in a kanamycin/non-glucose containing medium (2×TY with 50 μg/ml kanamycin and 100 ug/ml ampicillin). This culture was grown overnight at 30° C. (300 rpm). Phage were harvested in the supernatant following centrifugation and were ready to use in the second and third rounds of selection as described in FIG. 1.

TABLE 3

| | | Sequence for Her2 region of fusion |
|---|---|---|
| Name | Description | protein |
| Her008P | Full-length extracellular | MELAALCRWGLLLALLPPGAASTQVCT |
| (Synonyms: | domain (ECD) of Her2 | GTDMKLRLPASPETHLDMLRHLYQGC |
| ECD; SIIS; | expressed with a mIgG2a Fc | QVVQGNLELTYLPTNASLSFLQDIQEV |
| HER008) | tail | QGYVLIAHNQVRQVPLQRLRIVRGTQL |
| | | FEDNYALAVLDNGDPLNNTTPVTGASP |
| | | GGLRELQLRSLTEILKGGVLIQRNPQLC |
| | | YQDTILWKDIFHKNNQLALTLIDTNRSR |
| | | ACHPCSPMCKGSRCWGESSEDCQSL |
| | | TRTVCAGGCARCKGPLPTDCCHEQCA |
| | | AGCTGPKHSDCLACLHFNHSGICELHC |
| | | PALVTYNTDTFESMPNPEGRYTFGASC |
| | | VTACPYNYLSTDVGSCTLVCPLHNQEV |
| | | TAEDGTQRCEKCSKPCARVCYGLGME |
| | | HLREVRAVTSANIQEFAGCKKIFGSLAF |
| | | LPESFDGDPASNTAPLQPEQLQVFETL |
| | | EEITGYLYISAWPDSLPDLSVFQNLQVI |
| | | RGRILHNGAYSLTLQGLGISWLGLRSL |
| | | RELGSGLALIHHNTHLCFVHTVPWDQL |
| | | FRNPHQALLHTANRPEDECVGEGLAC |
| | | HQLCARGHCWGPGPTQCVNCSQFLR |
| | | GQECVEECRVLQGLPREYVNARHCLP |
| | | CHPECQPQNGSVTCFGPEADQCVACA |
| | | HYKDPPFCVARCPSGVKPDLSYMPIW |
| | | KFPDEEGACQPCPINCTHSCVDLDDKG |
| | | CPAEQRASPLTSIIS (SEQ ID NO: 242) |
| Her017P | Her2 ECD with a deletion in | MELAALCRWGLLLALLPPGAASTQVCT |
| (Synonyms: | the membrane proximal 9 | GTDMKLRLPASPETHLDMLRHLYQGC |
| EQR; | amino acids expressed with | QVVQGNLELTYLPTNASLSFLQDIQEV |
| HER017) | a mIgG2a Fc tail | QGYVLIAHNQVRQVPLQRLRIVRGTQL |
| | | FEDNYALAVLDNGDPLNNTTPVTGASP |
| | | GGLRELQLRSLTEILKGGVLIQRNPQLC |
| | | YQDTILWKDIFHKNNQLALTLIDTNRSR |
| | | ACHPCSPMCKGSRCWGESSEDCQSL |
| | | TRTVCAGGCARCKGPLPTDCCHEQCA |
| | | AGCTGPKHSDCLACLHFNHSGICELHC |
| | | PALVTYNTDTFESMPNPEGRYTFGASC |
| | | VTACPYNYLSTDVGSCTLVCPLHNQEV |
| | | TAEDGTQRCEKCSKPCARVCYGLGME |
| | | HLREVRAVTSANIQEFAGCKKIFGSLAF |
| | | LPESFDGDPASNTAPLQPEQLQVFETL |
| | | EEITGYLYISAWPDSLPDLSVFQNLQVI |
| | | RGRILHNGAYSLTLQGLGISWLGLRSL |
| | | RELGSGLALIHHNTHLCFVHTVPWDQL |
| | | FRNPHQALLHTANRPEDECVGEGLAC |
| | | HQLCARGHCWGPGPTQCVNCSQFLR |
| | | GQECVEECRVLQGLPREYVNARHCLP |
| | | CHPECQPQNGSVTCFGPEADQCVACA |
| | | HYKDPPFCVARCPSGVKPDLSYMPIW |
| | | KFPDEEGACQPCPINCTHSCVDLDDKG |
| | | CPAEQR (SEQ ID NO: 243) |
| Her018P | Her2 ECD with a deletion in | MELAALCRWGLLLALLPPGAASTQVCT |
| (Synonyms: | the CR2 (Domain IV) region | GTDMKLRLPASPETHLDMLRHLYQGC |
| 1.8; | expressed with a mIgG2a Fc | QVVQGNLELTYLPTNASLSFLQDIQEV |
| HER018) | tail | QGYVLIAHNQVRQVPLQRLRIVRGTQL |
| | | FEDNYALAVLDNGDPLNNTTPVTGASP |
| | | GGLRELQLRSLTEILKGGVLIQRNPQLC |
| | | YQDTILWKDIFHKNNQLALTLIDTNRSR |
| | | ACHPCSPMCKGSRCWGESSEDCQSL |
| | | TRTVCAGGCARCKGPLPTDCCHEQCA |
| | | AGCTGPKHSDCLACLHFNHSGICELHC |
| | | PALVTYNTDTFESMPNPEGRYTFGASC |
| | | VTACPYNYLSTDVGSCTLVCPLHNQEV |
| | | TAEDGTQRCEKCSKPCARVCYGLGME |
| | | HLREVRAVTSANIQEFAGCKKIFGSLAF |
| | | LPESFDGDPASNTAPLQPEQLQVFETL |
| | | EEITGYLYISAWPDSLPDLSVFQNLQVI |
| | | RGRILHNGAYSLTLQGLGISWLGLRSL |
| | | RELGSGLALIHHNTHLCFVHTVPWDQL |
| | | FRNPHQALLHTANRPEDECVGEGLAC |
| | | HQLCARGHCWGPGPTQCVNCSQFLR |
| | | GQECVEECRVLQGLPREYVNARHCLP |
| | | CHPECQPQNGSVTCFGPEADQCVACA |
| | | HYKDPPFCVAR (SEQ ID NO: 244) |
| Her054P | Domains I (L1) and II (CR-1) | MELAALCRWGLLLALLPPGAASTQVCT |
| (Synonyms: | of Her2 expressed with a | GTDMKLRLPASPETHLDMLRHLYQGC |
| L1-CR1; | mIgG2a Fc tail | QVVQGNLELTYLPTNASLSFLQDIQEV |
| 1.0) | | QGYVLIAHNQVRQVPLQRLRIVRGTQL |
| | | FEDNYALAVLDNGDPLNNTTPVTGASP |
| | | GGLRELQLRSLTEILKGGVLIQRNPQLC |
| | | YQDTILWKDIFHKNNQLALTLIDTNRSR |
| | | ACHPCSPMCKGSRCWGESSEDCQSL |
| | | TRTVCAGGCARCKGPLPTDCCHEQCA |
| | | AGCTGPKHSDCLACLHFNHSGICELHC |
| | | PALVTYNTDTFESMPNPEGRYTFGASC |
| | | VTACPYNYLSTDVGSCTLVCPLHNQEV |
| | | TAEDGTQRCEKCSKPC (SEQ ID NO: 245) |
| Full length | | MELAALCRWGLLLALLPPGAASTQVCT |
| HER2 | | GTDMKLRLPASPETHLDMLRHLYQGC |
| | | QVVQGNLELTYLPTNASLSFLQDIQEV |
| | | QGYVLIAHNQVRQVPLQRLRIVRGTQL |
| | | FEDNYALAVLDNGDPLNNTTPVTGASP |
| | | GGLRELQLRSLTEILKGGVLIQRNPQLC |
| | | YQDTILWKDIFHKNNQLALTLIDTNRSR |
| | | ACHPCSPMCKGSRCWGESSEDCQSL |
| | | TRTVCAGGCARCKGPLPTDCCHEQCA |
| | | AGCTGPKHSDCLACLHFNHSGICELHC |
| | | PALVTYNTDTFESMPNPEGRYTFGASC |
| | | VTACPYNYLSTDVGSCTLVCPLHNQEV |
| | | TAEDGTQRCEKCSKPCARVCYGLGME |
| | | HLREVRAVTSANIQEFAGCKKIFGSLAF |
| | | LPESFDGDPASNTAPLQPEQLQVFETL |
| | | EEITGYLYISAWPDSLPDLSVFQNLQVI |
| | | RGRILHNGAYSLTLQGLGISWLGLRSL |
| | | RELGSGLALIHHNTHLCFVHTVPWDQL |
| | | FRNPHQALLHTANRPEDECVGEGLAC |
| | | HQLCARGHCWGPGPTQCVNCSQFLR |
| | | GQECVEECRVLQGLPREYVNARHCLP |
| | | CHPECQPQNGSVTCFGPEADQCVACA |
| | | HYKDPPFCVARCPSGVKPDLSYMPIW |
| | | KFPDEEGACQPCPINCTHSCVDLDDKG |
| | | CPAEQRASPLTSIISAVVGILLVVVLGVV |
| | | FGILIKRRQQKIRKYTMRRLLQETELVE |
| | | PLTPSGAMPNQAQMRILKETELRKVKV |
| | | LGSGAFGTVYKGIWIPDGENVKIPVAIK |
| | | VLRENTSPKANKEILDEAYVMAGVGSP |
| | | YVSRLLGICLTSTVQLVTQLMPYGCLLD |
| | | HVRENRGRLGSQDLLNWCMQIAKGMS |
| | | YLEDVRLVHRDLAARNVLVKSPNHVKIT |
| | | DFGLARLLDIDETEYHADGGKVPIKWM |
| | | ALESILRRRFTHQSDVWSYGVTVWEL |
| | | MTFGAKPYDGIPAREIPDLLEKGERLPQ |
| | | PPICTIDVYMIMVKCWMIDSECRPRFRE |
| | | LVSEFSRMARDPQRFVVIQNEDLGPAS |
| | | PLDSTFYRSLLEDDDMGDLVDAEEYLV |
| | | PQQGFFCPDPAPGAGGMVHHRHRSS |
| | | STRSGGGDLTLGLEPSEEEAPRSPLAP |
| | | SEGAGSDVFDGDLGMGAAKGLQSLPT |
| | | HDPSPLQRYSEDPTVPLPSETDGYVAP |
| | | LTCSPQPEYVNQPDVRPQPPSPREGP |
| | | LPAARPAGATLERPKTLSPGKNGVVKD |
| | | VFAFGGAVENPEYLTPQGGAAPQPHP |
| | | PPAFSPAFDNLYYWDQDPPERGAPPS |
| | | TFKGTPTAENPEYLGLDVPV (SEQ ID NO: 246) |

### Example 2

### Preparation of Phage or Crude Periplasmic Material for Use in ELISAs

[0223] ScFvs can be expressed either on the surface of a phage particle or in solution in the bacterial periplasmic space, depending upon the growth conditions used. To induce release of scFv into the periplasm, 96-deepwell plates containing 2×TY media with 0.1% glucose/100 μg/ml ampicillin were inoculated from thawed glycerol stocks (one clone per well) using the QPix2 Colony picker (Genetix) and grown at 37° C. (999 rpm) for ˜4 hours. Cultures were induced with IPTG at a final concentration of 0.02 mM and grown overnight at 30° C. (999 rpm). The contents of the bacterial periplasm (peripreps) were released by osmotic shock. Briefly, plates were centrifuged and pellets were resuspended in 150 μl HEPES periplasmic buffer (50 mM HEPES, pH7.4/0.5 mM EDTA/20% Sucrose), followed by the addition of 150 μl 1:5 HEPES:water and incubated on ice for 30 minutes. Plates were centrifuged and the scFv-containing supernatant was harvested.

[0224] To prepare phage expressing scFv on their surface, 96-well plates containing 150 μl 2×TY media with 2% glucose/100 μg/ml ampicillin were inoculated from thawed glycerol stocks as described above and grown at 37° C. (700 rpm) for ˜4 hours. 20 μl of a 1:1000 dilution of helper phage (˜2×10⁸ pfu) was added and the plates incubated for a further hour at 37° C. (300 rpm). Plates were centrifuged and the media was replaced with a kanamycin/non-glucose containing media (2×TY with 50 μg/ml kanamycin and 100 ug/ml ampicillin). Plates were grown overnight at 30° C. (700 rpm) and phage were harvested in the supernatant following centrifugation.

[0225] Thirty-one Her2-binding ScFv's were identified by three rounds of screenings as illustrated in FIG. 1. These ScFv's specifically bind to the ECD region of Her2.

[0226] Among these thirty-one Her2-binding ScFv's, fourteen ScFv's were expressed on the surface of a phage particle for the purpose of screening. These ScFv's are: S1R2A_CS_{—}1F7, S1R2A_CS_{—}1D11, S1R2C_CS_{—}1D3, S1R2C_CS_{—}1H12, S1R2A_CS_{—}1D3, S1R3B2_BMV_{—}1E1, S1R3C1_CS_{—}1D3, S1R3B2_DP47_{—}1E8, S1R3B2_BMV_{—}1G2, S1R3B2_BMV_{—}1H5, S1R3C1_CS_{—}1A6, S1R3B1_DP47_{—}1C9, S1R3B2_DP47_{—}1E10, and S1R3C1_CS_{—}1B10 (FIGS. 2 and 3).

[0227] The remaining seventeen ScFv's were expressed in bacterial periplasm in soluble form for the purpose of screening: S1R3A1_BMV_{—}1F3, S1R3B1_BMV_{—}1G11, S1R3A1_BMV_{—}1G4, S1R3B1_BMV_{—}1H11, S1R3A1_CS_{—}1B9, S1R3B1_BMV_{—}1H9, S1R3A1_CS_{—}1B10, S1R3B1_BMV_{—}1C12, S1R3C1_BMV_{—}1H11, S1R3B1_BMV_{—}1A10, S1R3A1_CS_{—}1D11, S1R3C1_DP47_{—}1H1, S1R3A1_CS_{—}1B12, S1R3B1_BMV_{—}1H5, S1R3A1_DP47_{—}1A6, S1R3B1_DP47_{—}1E1, and S1R3B1_BMV_{—}1A1 (FIGS. 2 and 3).

### Example 3

### ELISA to Test Her2 Protein Construct Binding by scFvs Expressed in the E. coli Periplasm, on the Surface of Phage, or in Mammalian Cells as Fc Fusions

[0228] Various Her2-Fc proteins (e.g., Her008P, Her017P, Her018P, etc.) or a negative control murine IgG2a protein were coated overnight at 4° C. on 96-well Nunc Maxisorp at a concentration of 1 ug/ml in PBS. Alternatively, pre-blocked streptavidin-coated plates (Greiner) were coated with biotinylated Her2-Fc proteins for 1 hour at room temperature at a concentration of 1 ug/ml in block buffer (3% skim milk/1% BSA/PBS). Plates were washed three times using PBS and blocked for 1 hour at room temperature in 3% skim milk/1% BSA/PBS. Phage or peripreps were prepared as described above and were blocked for 1 hour at room temperature in an equal volume of 6% skim milk/1% BSA/PBS. Blocked plates were washed five times with PBS and 50 μl/well of blocked phage or periprep were transferred to the appropriate plates and incubated for 1 hour at room temperature. A 1 ug/ml solution of HERCEPTIN® (trastuzumab) (in blocking buffer) was added to well H12 of each plate to serve as a positive control. Plates were washed five times with PBS prior to the addition of a 1:250 dilution of anti-myc peroxidase (Roche), a 1:2500 dilution of anti-M13 peroxidase (Amersham Biosciences) or a 1:5000 or 1:1000 dilution of goat anti-human peroxidase (Southern Biotech) secondary antibody to detect bound scFv, phage, HERCEPTIN® (trastuzumab) or SMIP, respectively. Plates were incubated for a further hour at room temperature and washed seven times with PBS. Signal was developed using TMB, the reaction stopped with H₂SO₄ and the absorbance read at 450 nm on an Envision plate reader (Perkin Elmer). The results of these binding assays are shown in FIG. 5.

[0229] Alternatively, plates were coated with 1 ug/ml of a SMIP (Her030, Her033/Her067, Her018) or antibody (Herceptin®, positive control). SMIPs were used to capture 3-fold serial dilution (9-0 μg/ml) of soluble protein sample (see FIG. 27). Captured soluble protein was detected using 0.1 mg/ml anti-c-Erb B2/c-Neu (Ab-5) mouse mAb (TA-1; binds ECD; Calbiochem) and detected using HRP-conjugated Goat anti-mouse IgG (Fcg Subclass 1 specific; Jackson ImmuonoResearch).

[0230] The results of the SMIP binding assays are shown in FIG. 6A-C, FIG. 7A-7D, FIG. 8, AND FIGS. 28-30. In FIG. 8, the binding of HER018, HER026-HER039, and Herceptin® (trastuzumab) and HER018, to Her2 protein constructs was scored as −, +, ++ or +++; the, while the binding of HER071-HER087 to Her2 protein constructs was scored as a − or +. In FIG. 28, the binding of HER SMIPs to Her2 protein constructs was scored as 0, +, ++, or +++, and cross-reactivity and binding domain are shown. FIG. 29 is a graphical summary of the results. HER085 bound soluble full length Her2 ectodomain (ECD) (SIIS dimer) but not soluble Her2 EQR(SIIS lacking membrane proximal amino acids ASPLTSIIS). This indicated that HER085 binding domain required “stumpy” amino acids ASPLTSIIS. HER156 and HER169 did not bind soluble full length HER2ECD (SIIS dimer) which includes the “stumpy” peptide although they bound the synthetic “stumpy” ASPLTSIIS peptide on which they were selected. This suggests that the “stumpy” peptide in Her2 SIIS was not presented in a form recognized by HER156 and HER169, because HER156 and HER169.

[0231] The results are summarized in the following Table.

| | Binding | Human V_{H} | Human V_{L} germline |
|---|---|---|---|
| mAB | phenotype | germline gene | gene |
| S1R3B1_DP47_3A2 | Group 2 | Vh3_DP-47_(3-23) | Vlambda2_DPL11_(2a2) |
| S1R3A1_DP47_11B7 | Group 3 | Vh3_DP-47_(3- | Vlambda1_DPL8_(1e) |
| | | 23) | |
| S1R3A1_DP47_11D1 | Group 3 | Vh3_DP-47_(3- | Vlambda3_DPL16_(3l) |
| | | 23) | |
| S1R3A1_DP47_7F3 | Group 3 | Vh3_DP-47_(3- | Vlambda1_DPL8_(1e) |
| | | 23) | |
| S1R2B_DP47_4E3 | Group 3 | Vh3_DP-47_(3- | Vlambda1_DPL3_(1g) |
| | | 23) | |
| S1R3C1_DP47_2G2 | Group 3 | Vh3_DP-47_(3- | Vlambda1_DPL2_(1c) |
| | | 23) | |
| S1R3A1_DP47_11H6 | Group 3 | Vh3_DP-47_(3- | Vlambda1_DPL3_(1g) |
| | | 23) | |
| S1R3A1_BMV_3B1 | Group 3 | Vh3_DP-49_(3- | Vlambda2_DPL11_(2a2) |
| | | 30.5) | |
| S1R3A1_DP47_6B9 | Group 3 | Vh3_DP-47_(3- | Vlambda1_DPL8_(1e) |
| | | 23) | |
| S1R2A_CS_10B8 | Group 3 | Vh1_DP-7_(1- | Vlambda1_DPL2_(1c) |
| | | 46) | |
| S1R3A1_DP47_7A6 | Group 3 | Vh3_DP-47_(3- | Vlambda1_DPL8_(1e) |
| | | 23) | |
| S1R3B2_DP47_2G3 | Group 3 | Vh3_DP-47_(3- | Vlambda3_DPL16_(3l) |
| | | 23) | |
| S1R2B_CS_6H11 | Group 3 | Vh5_DP-73_(5- | Vlambda8_DPL21_(8a) |
| | | 51) | |
| S1R3A1_DP47_10G1 | Group 3 | Vh3_DP-47_(3- | Vlambda1_DPL8_(1e) |
| | | 23) | |
| S1R3A1_DP47_7C1 | Group 3 | Vh3_DP-47_(3- | Vlambda1_DPL8_(1e) |
| | | 23) | |
| S1R2A_DP47_5D6 | Group 3 | Vh3_DP-47_(3- | Vk3_DPK22_(A27) |
| | | 23) | |
| S1R3A1_DP47_11F6 | Group 3 | Vh3_DP-47_(3- | Vlambda1_DPL5_(1b) |
| | | 23) | |
| S1R3A1_DP47_11D3 | Group 3 | Vh3_DP-47_(3- | Vlambda1_DPL3_(1g) |
| | | 23) | |
| S1R3A1_CS_8A8 | Group 3 | Vh5_DP-73_(5- | Vlambda8_DPL21_(8a) |
| | | 51) | |
| S1R3A1_BMV_5D10 | Group 3 | Vh3_DP-47_(3- | Vk1_L12 |
| | | 23) | |
| S1R3A1_DP47_11C1 | Group 3 | Vh3_DP-47_(3- | Vlambda3_DPL16_(3l) |
| | | 23) | |
| S1R3A1_DP47_4E1 | Group 3 | Vh3_DP-47_(3- | Vlambda1_DPL8_(1e) |
| | | 23) | |
| S1R3A1_DP47_10E1 | Group 3 | Vh3_DP-47_(3- | Vlambda1_DPL2_(1c) |
| | | 23) | |
| S1R3A1_CS_11C3 | Group 3 | Vh1_DP-14_(1- | Vlambda3_DPL16_(3l) |
| | | 18) | |
| S1R3A1_CS_13H11 | Group 3 | Vh1_DP- | Vlambda1_DPL5_(1b) |
| | | 8.75_(1-02) | |
| S1R3A1_CS_2D9 | Group 4 | Vh5_DP-73_(5- | Vk1_L12 |
| | | 51) | |
| S1R2A_CS_3D4 | Group 4 | Vh1_DP- | Vlambda1_DPL8_(1e) |
| | | 8.75_(1-02) | |
| S1R3A1_DP47_2H6 | Group 4 | Vh3_DP-47_(3- | Vlambda3_DPL23_(3r) |
| | | 23) | |
| S1R3A1_DP47_4G1 | Group 4 | Vh3_DP-47_(3- | Vlambda3_3h |
| | | 23) | |
| S1R2A_DP47_3C1 | Group 4 | Vh3_DP-47_(3- | Vlambda3_DPL23_(3r) |
| | | 23) | |
| S1R3A1_DP47_7B2 | Group 4 | Vh3_DP-47_(3- | Vk1_DPK6_(L19) |
| | | 23) | |
| S1R3B2_DP47_4E2 | Group 4 | Vh3_DP-47_(3- | Vlambda1_DPL2_(1c) |
| | | 23) | |
| S1R3A1_CS_16C2 | Group 4 | Vh3_DP-47_(3- | Vlambda3_DPL16_(3l) |
| | | 23) | |
| S1R3A1_CS_11E5 | Group 4 | Vh5_DP-73_(5- | Vlambda8_DPL21_(8a) |
| | | 51) | |
| S1R3A1_CS_16D7 | Group 4 | Vh5_DP-73_(5- | Vlambda8_DPL21_(8a) |
| | | 51) | |
| S1R2A_CS_10B10 | Group 4 | Vh1_DP- | Vlambda8_DPL21_(8a) |
| | | 8.75_(1-02) | |
| S1R3A1_CS_15C2 | Group 4 | Vh4_DP-70_(4- | Vlambda3_DPL16_(3l) |
| | | 04) | |
| S1R3A1_CS_9C1 | Group 4 | Vh4_DP-67_(4- | Vlambda1_DPL8_(1e) |
| | | b) | |
| S1R2A_CS_5A1 | Group 4 | Vh3_DP-47_(3- | Vlambda1_DPL2_(1c) |
| | | 23) | |
| S1R2A_CS_8C8 | Group 4 | Vh5_DP-73_(5- | Vlambda8_DPL21_(8a) |
| | | 51) | |
| S1R3A1_CS_13H5 | Group 4 | Vh5_DP-73_(5- | Vlambda8_DPL21_(8a) |
| | | 51) | |
| S1R2B_CS_5E9 | Group 4 | Vh5_DP-73_(5- | Vlambda8_DPL21_(8a) |
| | | 51) | |
| S1R3A1_CS_8F9 | Group 4 | Vh5_DP-73_(5- | Vlambda8_DPL21_(8a) |
| | | 51) | |
| S1R3A1_CS_14B5 | Group 4 | Vh5_DP-73_(5- | Vlambda8_DPL21_(8a) |
| | | 51) | |
| S1R2A_CS_9E10 | Group 4 | Vh5_DP-73_(5- | Vlambda8_DPL21_(8a) |
| | | 51) | |
| S1R3A1_CS_7A10 | Group 4 | Vh5_DP-73_(5- | Vlambda8_DPL21_(8a) |
| | | 51) | |
| S1R3A1_BMV_6H7 | Group 4 | Vh3_DP-46_(3- | Vk1_L12 |
| | | 30.3) | |
| S1R3A1_CS_12A11 | Group 4 | Vh5_DP-73_(5- | Vlambda8_DPL21_(8a) |
| | | 51) | |
| S1R3A1_CS_13D12 | Group 4 | Vh5_DP-73_(5- | Vlambda8_DPL21_(8a) |
| | | 51) | |
| S1R3A1_CS_7A8 | Group 4 | Vh4_DP-79_(4- | Vlambda8_DPL21_(8a) |
| | | 39) | |
| S1R2A_CS_2C9 | Group 4 | Vh1_DP-7_(1- | Vk3_DPK21_(L2) |
| | | 46) | |
| S1R3A1_CS_12D1 | Group 4 | Vh3_3-73 | Vlambda1_DPL8_(1e) |
| S1R2A_CS_7D4 | Group 4 | Vh1_DP-5_(1- | Vlambda8_DPL21_(8a) |
| | | 24) | |
| S1R3A1_CS_15B8 | Group 4 | Vh5_DP-73_(5- | Vlambda8_DPL21_(8a) |
| | | 51) | |
| S6R3_DP47_1A10 | Group 1 | 3-23 (DP47) | Vλ 1c (DPL2) |
| S6R2_DP47_1E11 | Group 1 | 3-23 (DP47) | Vλ 1c (DPL2) |
| S5R2_DP47_1H11 | Group 1 | 3-23 (DP47) | Vλ 1c (DPL2) |
| S6R3_CS_1G5 | Group 1 | 4-39 | Vλ 1g (DPL3) |
| | | (DP79) | |
| S6R2_DP47_1H11 | Group 1 | 3-23 (DP47) | Vλ 1b (DPL5) |
| S5R3_DP47_1A10 | Group 1 | 3-23 (DP47) | Vλ 1e (DPL8) |
| S5R2_DP47_1D11 | Group 1 | 3-23 (DP47) | Vλ 1e (DPL8) |
| S5R2_CS_1A8 | Group 1 | 5-51 (DP73) | Vλ 1e (DPL8) |
| S6R3_CS_1B7 | Group 1 | 5-51 (DP73) | Vλ 1e (DPL8) |
| S6R2_CS_1E5 | Group 1 | 1-02 (DP-8,75) | Vλ 2e2 (DPL11) |
| S6R3_BMV_1C2 | Group 1 | 7-4.1 (DP21) | Vλ 2a2 (DPL11) |
| S5R2_DP47_1B10 | Group 1 | 3-23 (DP47) | Vλ 3l (DPL16) |
| S6R3_DP47_1C12 | Group 1 | 3-23 (DP47) | Vλ 3l (DPL16) |
| S5R2_DP47_1D10 | Group 1 | 3-23 (DP47) | Vλ 3l (DPL16) |
| S6R3_DP47_1H9 | Group 1 | 3-23 (DP47) | Vλ 3l (DPL16) |

### Example 4

### ELISA to Measure Binding of scFvs (Expressed in the Periplasm or on the Surface of Phage) to Her2-Expressed Cells

[0232] 2×10⁴ CHOK1 cells/well were seeded in a 96-well tissue culture plate on Day 1 and incubated at 37° C./5% CO₂ for 2-4 days until a confluent monolayer was observed. Cells were washed five times with PBS (+Ca/Mg ions) and blocked for 1 hour at room temperature with 3% skim milk/1% BSA/PBS (+Ca/Mg ions). Phage or peripreps were prepared as described above and were blocked for 1 hour at room temperature in an equal volume of 6% skim milk/1% BSA/PBS (+Ca/Mg ions). Blocked plates were washed five times with PBS (+Ca/Mg ions) and 50 μl/well of blocked phage or periprep were transferred to the appropriate plates and incubated for 1 hour at room temperature. A 1 ug/ml solution of HERCEPTIN® (trastuzumab) (in blocking buffer) was added to well H12 of each plate to serve as a positive control. Plates were washed five times with PBS (+Ca/Mg ions) prior to the addition of a 1:250 dilution of anti-myc peroxidase (Roche), a 1:2500 dilution of anti-M13 peroxidase (Amersham Biosciences) or a 1:5000 dilution of goat anti-human (Southern Biotech) secondary antibody to detect bound scFv, phage or HERCEPTIN® (trastuzumab) respectively. Plates were incubated for a further hour at room temperature and washed ten times with PBS (+Ca/Mg ions). Signal was developed using TMB, the reaction stopped with H₂SO₄ and the absorbance read at 450 nm on an ENVISION plate reader (Perkin Elmer). The results of these binding assays are shown in FIG. 5.

[0233] Alternatively, we tested anti-HER2SMIP binding to cell line including JIMT-1, SKBR3, BT474, 22rv1, MDA-MB-175, MDA-MB-453, MDA-MB-361 (ATCC), MDA-MB-361 (JL), and Ramos (Her2⁻/CD20⁺ control). Controls used included Herceptin® (trastuzumab), Rituxan® (anti-CD20 mAb rituximab), and CD20-SMIP(2LM20-4 SCCP).

[0234] Each well of a 6 well plate was seeded with 2×10⁵ cells and incubated overnight at 37° C./5% CO₂. Cells were then treated with antibody or SMIP (at 10 ug/ml final) (in triplicate) and incubated for another 24 or 48 hours. After incubation, the cells were pulsed with 50 uM BrdU (Sigma) for 30 minutes at 37° C., the media was removed, and the cells were treated with trypsin (except Ramos) and then 3-3.5×10⁵ cells per well were stained in 100 μl Staining Buffer in the presence or absence of a SMIP or antibody one of three different concentrations (ranging from 200 nM to 0.27 nM). The SMIP or antibody treatment was removed and the cells were washed three times with PBS, pH 7.2-7.4 with 0.1% TWEEN®-20 (PBS-T). A secondary antibody (5 ug/ml Alexa Fluor 488-conjugated Goat anti-Human IgG; Molecular Probes #A-11013) was then added and incubated for 1-2 hours at room temperature. The secondary antibody was removed and the cells washed again three times with PBS-T. The cells were then fixed in 1% paraformaldehyde in Staining Buffer and analyzed 1 hour to 1 day later.

[0235] The results of these binding assays are shown in FIG. 8 and FIGS. 9A-9H and are summarized in FIG. 31. (In FIG. 9E, 0.82 nM HER094 data not collected due to mechanical error.) As shown in the Figures, SMIPs maintain a similar staining pattern regardless of the amount of HER2 on the cell surface and the other ErbB receptors/ligands expressed by the cell lines (relative surface staining for ErbB1, Her2, Erb3 and production of ligand by cell lines is not shown). In these experiments, the SMIP staining pattern is HER116>HER067>HER012>HER146>HER094. Additionally, HER116 binding to BT-474 cells changes the FSC vs SSC profile of BT-474 cells in a manner that suggests clumping.

[0236] JIMT-1 Binding Assay

[0237] To investigate anti-HER2SMIP binding to JIMT-1 cells we dissociated JIMT-1 cells with trypsin or non-enzymatic CellStripper™ (cellgro Mediatech #25-056-C1). JIMT-1 ErbB2 epitopes may be partially blocked by MUC4 (Peter Nagy, Elza Friedländer, Minna Tanner, Anita I. Kapanen, Kermit L. Carraway, Jorma Isola, and Thomas M. Jovin. Decreased Accessibility and Lack of Activation of ErbB2 in JIMT-1, a Herceptin-Resistant, MUC4-Expressing Breast Cancer Cell Line. Cancer Res 65(2): 473-482, 2005). We then washed cells three times after dissociation and stained them in duplicate with 200 nM Antibody/SMIP (200 nM=22 μg/mL SMIP). We performed secondary staining with 5 μg/mL Alexa Fluor 488-conjugated Goat anti-Human IgG (Molecular Probes #A-11013).

[0238] The results are shown in FIG. 32. As shown in FIG. 32, HER085, HER156 and HER169, all “stumpy” binders bind to multiple cell lines harvested by non-enzymatic means better than to trypsinized cells, suggesting that the epitope recognized by these SMIPS may be sensitive to trypsin whereas other SMIPs and HERCEPTIN® showed equal or better binding on trypsinized cells. This sensitivity was not likely to be direct as trypsin did not affect the ability of other SMIPs to bind to the full length Her2 ECD (which contains the “stumpy” peptide ASPLTSIIS). The sensitivity may be due to trypsin cleavage of other molecules that are needed for the presentation/exposure of the “stumpy” peptide or the maintenance of Her2 p95 (“stumpy”) on the cell surface.

[0239] Enzymatic Vs Non-Enzymatic Preparation

[0240] We further investigated the effects of enzymatic vs non-enzymatic preparation of the cells on SMIP binding. Briefly, we removed media from cells and rinsed them with PBS (−Ca/Mg). We then dissociated the cells with trypsin (0.25%) or non-enzymatic CellStripper™ (Cellgro Mediatech #25-056-C1). We washed dissociated cells once in cold media (containing FBS), and washed them again in cold PBS (+Ca/Mg). We then resuspended the cells in cold Staining Buffer (PBS, +Ca/Mg, 2% FBS) and counted resuspended cells. We stained 300,000-350,000 cells per well on ice in 100 μl Staining Buffer +/− primary at 200 nM SMIP/Antibody (200 nM=22 μg/ml SMIP) with 1 μg/ml PI. We then washed the stained cells three times with cold Staining Buffer. We performed secondary staining with 5 μg/ml Alexa Fluor 488-conjugated Goat anti-Human IgG (Molecular Probes #A-11013) with 1 μg/ml PI. We then fixed the cells in 1% Paraformaldehyde in Staining Buffer and analyzed the next day. Results of various cell line staining with “stumpy binders” HER 156 and HER169 are shown in FIG. 33.

[0241] Species Cross-Reactivity

[0242] To determine species cross-reactivity, we performed the above-mentioned binding assay with NIH/3T3 cells transfected with Macaca Her2 and with CHO cells expressing Murine Her2. The results of the cross-reactivity binding studies are summarized in FIG. 34. Herceptin®, HER018, HER095, and HER124 cross-react with Macaca Her2, while HER102, HER116, HER133, and HER146 cross-react with both Macaca Her2 and Murine Her2.

### Example 5

### PCR Amplification of scFv Regions for Sequencing Analysis

[0243] PCR amplification of scFvs was carried out using the KOD HOT START DNA Polymerase kit (Novagen) in accordance with the manufacturers instructions. 0.2 μM each of the M13rev (5′ GGAAACAGCTATGACCATGA 3′) (SEQ ID NO: 247) forward and Mycseq (5′ CTCTTCTGAGATGAGTTTTTG 3′) (SEQ ID NO: 248) reverse primers were used. 5 μl of a 1:10 dilution of a stationary phase bacterial culture was used as the template for a final reaction volume of 20 μl. The cycling conditions used were a 2 minute hot start at 94° C., 25 cycles of denaturation at 94° C. (1 minute), primer annealing at 42° C. (30 seconds) and extension at 72° C. (1 min), followed by a final 5 minute extension at 72° C. PCR products were verified by agarose gel electrophoresis and cleaned up with Exol/SAP (shrimp alkaline phosphatase) prior to sequencing of both strands with primers 145837 (5′ GGAGATTTTCAACGTGAA 3′) (SEQ ID NO: 249) and 142051 (5′ CTCTTCTGAGATGAGTTTTTG 3′) (SEQ ID NO: 250). The closest human germlines of the V_{H} and V_{L} segments were determined (Table 4).

TABLE 4
V_{H} and V_{L} germlines of ERBB2 clones

| Mab | Human V_{H} germline gene | Human V_{L} germline gene |
|---|---|---|
| S1R2A_CS_1F7 | 1-02 | Vλ 3h |
| | (DP8/75) | |
| S1R2A_CS_1D11 | 1-69 | Vλ 1b (DPL5) |
| | (DP10) | |
| S1R2C_CS_1D3 | 1-69 | Vλ 1b (DPL5) |
| | (DP10) | |
| S1R2C_CS_1H12 | 3-48 | Vλ 1c (DPL2) |
| | (DP51) | |
| S1R2A_CS_1D3 | 1-02 | Vλ 1g (DPL3) |
| | (DP8/75) | |
| S1R3B2_BMV_1E1 | 3-33 | Vλ 1b (DPL5) |
| | (DP50) | |
| S1R3C1_CS_1D3 | 6-1 | Vλ 2c |
| | (DP74) | |
| S1R3B2_DP47_1E8 | 3-23 | Vλ 1e (DPL8) |
| | (DP47) | |
| S1R3B2_BMV_1G2 | 1-18 | Vκ L12 |
| | (DP14) | |
| S1R3B2_BMV_1H5 | 3-33 | Vλ 2a2 (DPL11) |
| | (DP50) | |
| S1R3C1_CS_1A6 | 5-51 | Vλ 1c (DPL2) |
| | (DP73) | |
| S1R3B2_DP47_1C9 | 3-23 | Vλ 1c (DPL2) |
| | (DP47) | |
| S1R3B2_DP47_1E10 | 3-23 | Vλ 1g (DPL3) |
| | (DP47) | |
| S1R3C1_CS_1B10 | 1-69 | Vλ 6a |
| | (DP10) | |
| S1R3A1_BMV_1F3 | 3-21 | Vλ 31 (DPL16) |
| | (DP77) | |
| S1R3B1_BMV_1G11 | 3-23 | Vλ 2a2 (DPL11) |
| | (DP47) | |
| S1R3A1_BMV_1G4 | 1-03 | Vλ 2a2 (DPL11) |
| | (DP25) | |
| S1R3B1_BMV_1H11 | 3-23 | Vκ L12 |
| | (DP47) | |
| S1R3A1_CS_1B9 | 5-51 | Vλ 8a (DPL21) |
| | (DP73) | |
| S1R3B1_BMV_1H9 | 4-04 | Vλ 3l (DPL16) |
| | (DP70) | |
| S1R3A1_CS_1B10 | 1-02 | Vλ 8a (DPL21) |
| | (DP8/75) | |
| S1R3B1_BMV_1C12 | 3-30.5 | Vλ 1c (DPL2) |
| | (DP49) | |
| S1R3C1_BMV_1H11 | 3-33 | Vλ 1e (DPL8) |
| | (DP50) | |
| S1R3B1_BMV_1A10 | 3-30.5 | Vλ 3l (DPL16) |
| | (DP49) | |
| S1R3A1_CS_1D11 | 5-51 | Vλ 8a (DPL21) |
| | (DP73) | |
| S1R3C1_DP47_1H1 | 3-23 | Vλ 3h |
| | (DP47) | |
| S1R3A1_CS_1B12 | 1-02 | Vλ 1e (DPL8) |
| | (DP8/75) | |
| S1R3B1_BMV_1H5 | 3-33 | Vλ 3l (DPL16) |
| | (DP50) | |
| S1R3A1_DP47_1A6 | 3-23 | Vλ 1c (DPL2) |
| | (DP47) | |
| S1R3B1_DP47_1E1 | 3-23 | Vλ 6a |
| | (DP47) | |
| S1R3B1_BMV_1A1 | 1-18 | Vλ 2a2 (DPL11) |
| | (DP14) | |
| S1R3B1_DP47_3A2 | (3-23) | Vlambda2_DPL11_(2a2) |
| | Vh3_DP-47_{—} | |
| S1R3A1_DP47_11B7 | (3-23) | Vlambda1_DPL8_(1e) |
| | Vh3_DP-47_{—} | |
| S1R3A1_DP47_11D1 | (3-23) | Vlambda3_DPL16_(3l) |
| | Vh3_DP-47_{—} | |
| S1R3A1_DP47_7F3 | (3-23) | Vlambda1_DPL8_(1e) |
| | Vh3_DP-47_{—} | |
| S1R2B_DP47_4E3 | (3-23) | Vlambda1_DPL3_(1g) |
| | Vh3_DP-47_{—} | |
| S1R3C1_DP47_2G2 | (3-23) | Vlambda1_DPL2_(1c) |
| | Vh3_DP-47_{—} | |
| S1R3A1_DP47_11H6 | (3-23) | Vlambda1_DPL3_(1g) |
| | Vh3_DP-47_{—} | |
| S1R3A1_BMV_3B1 | (3-30.5) | Vlambda2_DPL11_(2a2) |
| | Vh3_DP-49_{—} | |
| S1R3A1_DP47_6B9 | (3-23) | Vlambda1_DPL8_(1e) |
| | Vh3_DP-47_{—} | |
| S1R2A_CS_10B8 | (1-46) | Vlambda1_DPL2_(1c) |
| | Vh1_DP-7_{—} | |
| S1R3A1_DP47_7A6 | (3-23) | Vlambda1_DPL8_(1e) |
| | Vh3_DP-47_{—} | |
| S1R3B2_DP47_2G3 | (3-23) | Vlambda3_DPL16_(3l) |
| | Vh3_DP-47_{—} | |
| S1R2B_CS_6H11 | (5-51) | Vlambda8_DPL21_(8a) |
| | Vh5_DP-73_{—} | |
| S1R3A1_DP47_10G1 | (3-23) | Vlambda1_DPL8_(1e) |
| | Vh3_DP-47_{—} | |
| S1R3A1_DP47_7C1 | (3-23) | Vlambda1_DPL8_(1e) |
| | Vh3_DP-47_{—} | |
| S1R2A_DP47_5D6 | (3-23) | Vk3_DPK22_(A27) |
| | Vh3_DP-47 | |
| S1R3A1_DP47_11F6 | (3-23) | Vlambda1_DPL5_(1b) |
| | Vh3_DP-47_{—} | |
| S1R3A1_DP47_11D3 | (3-23) | Vlambda1_DPL3_(1g) |
| | Vh3_DP-47_{—} | |
| S1R3A1_CS_8A8 | (5-51) | Vlambda8_DPL21_(8a) |
| | Vh5_DP-73_{—} | |
| S1R3A1_BMV_5D10 | (3-23) | Vk1_L12 |
| | Vh3_DP-47_{—} | |
| S1R3A1_DP47_11C1 | (3-23) | Vlambda3_DPL16_(3l) |
| | Vh3_DP-47_{—} | |
| S1R3A1_DP47_4E1 | (3-23) | Vlambda1_DPL8_(1e) |
| | Vh3_DP-47_{—} | |
| S1R3A1_DP47_10E1 | (3-23) | Vlambda1_DPL2_(1c) |
| | Vh3_DP-47_{—} | |
| S1R3A1_CS_11C3 | (1-18) | Vlambda3_DPL16_(3l) |
| | Vh1_DP-14_{—} | |
| S1R3A1_CS_13H11 | (1-02) | Vlambda1_DPL5_(1b) |
| | Vh1_DP-8,75_{—} | |
| S1R3A1_CS_2D9 | (5-51) | Vk1_L12 |
| | Vh5_DP-73_{—} | |
| S1R2A_CS_3D4 | (1-02) | Vlambda1_DPL8_(1e) |
| | Vh1_DP-8,75 | |
| S1R3A1_DP47_2H6 | (3-23) | Vlambda3_DPL23_(3r) |
| | Vh3_DP-47_{—} | |
| S1R3A1_DP47_4G1 | (3-23) | Vlambda3_3h |
| | Vh3_DP-47_{—} | |
| S1R2A_DP47_3C1 | (3-23) | Vlambda3_DPL23_(3r) |
| | Vh3_DP-47_{—} | |
| S1R3A1_DP47_7B2 | (3-23) | Vk1_DPK6_(L19) |
| | Vh3_DP-47_{—} | |
| S1R3B2_DP47_4E2 | (3-23) | Vlambda1_DPL2_(1c) |
| | Vh3_DP-47_{—} | |
| S1R3A1_CS_16C2 | (3-23) | Vlambda3_DPL16_(3l) |
| | Vh3_DP-47_{—} | |
| S1R3A1_CS_11E5 | (5-51) | Vlambda8_DPL21_(8a) |
| | Vh5_DP-73_{—} | |
| S1R3A1_CS_16D7 | (5-51) | Vlambda8_DPL21_(8a) |
| | Vh5_DP-73_{—} | |
| S1R2A_CS_10B10 | (1-02) | Vlambda8_DPL21_(8a) |
| | Vh1_DP-8,75_{—} | |
| S1R3A1_CS_15C2 | Vh4_DP-70_(4-04) | Vlambda3_DPL16_(3l) |
| S1R3A1_CS_9C1 | Vh4_DP-67_(4-b) | Vlambda1_DPL8_(1e) |
| S1R2A_CS_5A1 | Vh3_DP-47_(3-23) | Vlambda1_DPL2_(1c) |
| S1R2A_CS_8C8 | Vh5_DP-73_(5-51) | Vlambda8_DPL21_(8a) |
| S1R3A1_CS_13H5 | Vh5_DP-73_(5-51) | Vlambda8_DPL21_(8a) |
| S1R2B_CS_5E9 | Vh5_DP-73_(5-51) | Vlambda8_DPL21_(8a) |
| S1R3A1_CS_8F9 | Vh5_DP-73_(5-51) | Vlambda8_DPL21_(8a) |
| S1R3A1_CS_14B5 | Vh5_DP-73_(5-51) | Vlambda8_DPL21_(8a) |
| S1R2A_CS_9E10 | Vh5_DP-73_(5-51) | Vlambda8_DPL21_(8a) |
| S1R3A1_CS_7A10 | Vh5_DP-73_(5-51) | Vlambda8_DPL21_(8a) |
| S1R3A1_BMV_6H7 | Vh3_DP-46_(3- | Vk1_L12 |
| | 30.3) | |
| S1R3A1_CS_12A11 | Vh5_DP-73_(5-51) | Vlambda8_DPL21_(8a) |
| S1R3A1_CS_13D12 | Vh5_DP-73_(5-51) | Vlambda8_DPL21_(8a) |
| S1R3A1_CS_7A8 | Vh4_DP-79_(4-39) | Vlambda8_DPL21_(8a) |
| S1R2A_CS_2C9 | Vh1_DP-7_(1-46) | Vk3_DPK21_(L2) |
| S1R3A1_CS_12D1 | Vh3_3-73 | Vlambda1_DPL8_(1e) |
| S1R2A_CS_7D4 | Vh1_DP-5_(1-24) | Vlambda8_DPL21_(8a) |
| S1R3A1_CS_15B8 | Vh5_DP-73_(5-51) | Vlambda8_DPL21_(8a) |
| S6R3_DP47_1A10 | 3-23 | Vλ 1c (DPL2) |
| | (DP47) | |
| S6R2_DP47_1E11 | 3-23 | Vλ 1c (DPL2) |
| | (DP47) | |
| S5R2_DP47_1H11 | 3-23 | Vλ 1c (DPL2) |
| | (DP47) | |
| S6R3_CS_1G5 | 4-39 | Vλ 1g (DPL3) |
| | (DP79) | |
| S6R2_DP47_1H11 | 3-23 | Vλ 1b (DPL5) |
| | (DP47) | |
| S5R3_DP47_1A10 | 3-23 | Vλ 1e (DPL8) |
| | (DP47) | |
| S5R2_DP47_1D11 | 3-23 | Vλ 1e (DPL8) |
| | (DP47) | |
| S5R2_CS_1A8 | 5-51 | Vλ 1e (DPL8) |
| | (DP73) | |
| S6R3_CS_1B7 | 5-51 | Vλ 1e (DPL8) |
| | (DP73) | |
| S6R2_CS_1E5 | 1-02 | Vλ 2e2 (DPL11) |
| | (DP-8,75) | |
| S6R3_BMV_1C2 | 7-4.1 | Vλ 2a2 (DPL11) |
| | (DP21) | |
| S5R2_DP47_1B10 | 3-23 | Vλ 3l (DPL16) |
| | (DP47) | |
| S6R3_DP47_1C12 | 3-23 | Vλ 3l (DPL16) |
| | (DP47) | |
| S5R2_DP47_1D10 | 3-23 | Vλ 3l (DPL16) |
| | (DP47) | |
| S6R3_DP47_1H9 | 3-23 | Vλ 3l (DPL16) |
| | (DP47) | |

### Example 6

### BIACORE® Binding Assays

[0244] Binding of different Her2-directed binders (antibodies and SMIPs) to monomeric Her2 ECD and truncations of dimeric Her2 ECD were determined using a BIACORE® T100 instrument (GE Healthcare, Biacore, Piscataway, N.J.). We conducted the binding experiments in both orientations, i.e., first using anti-HER2SMIPS as ligands and then as analytes.

[0245] SMIPs as Ligands

[0246] Her2-directed binders were captured on a chip by a monoclonal mouse anti-human Fc (GE healthcare), which was covalently conjugated to a carboxylmethyl dextran surface (CM4) via amines using N-ethyl-N′-(3-dimethylaminopropyl)-carbodiimide hydrochloride and N-hydroxysuccinimide. The unoccupied sites of the activated surface were blocked by ethanolamine. The capturing antibody (referred to as anti hFc) binds to the C_{H}2 domain of IgG Fc of all sub-classes and showed no discernible dissociation from the captured her2-binders during the course of the assay. Every cycle, 3 different Her2 binders and a non-binder (negative control) were individually captured by anti hFc on 4 different flow cells, typically to about 50 RU, followed by injection of the analyte (Her2 dimers and monomer) at a particular concentration for 10 minutes over all flow cells. The dissociation of the formed complexes were subsequently followed for 12 minutes. At the end of the cycle, the surface was regenerated gently using 3M MgCl₂ which dissociates protein bound to the capturing anti hFc antibody. Multiple such cycles were performed to study binding of different analytes at different concentrations, in the range of 0-300 nM, for each set of three Her2 binders captured. Her2 binders were reproducibly captured every cycle with CV not exceeding 1%. The binding was performed at 25° C. in 0.01 M HEPES pH 7.4, 0.15 M NaCl, 0.005% v/v SURFACTANT P20. Signal associated with binding to the negative control was used to subtract for bulk refractive changes. The kinetic parameters and affinities were determined using BIAEVALUATION software.

[0247] SMIPS as Analytes

[0248] In these experiments, the trastuzumab (HERCEPTIN®) and anti-HER2 SMIPs were used as the analytes and the soluble HER2 receptors were used as the ligands. In one experiment, SMIPs and trastuzumab were flowed over a histidine-tagged monomeric HER2 receptor that was bound to a Ni²⁺-nitrilotriacetic acid surface. In a second experiment, SMIPs and trastuzumab were flowed over a histidine-tagged HER2 receptor that was captured by an anti-6-histidine-tagged monoclonal antibody conjugated to a CM4 surface. In a third experiment, SMIPs and trastuzumab were flowed over a HER2 receptor that was directly amine-coupled to a CM4 surface. The binding in each of these three experimental designs was performed at 25° C. When employing any of the three experimental designs listed above, similar results were obtained. Signal associated with binding to the negative control was used to subtract for bulk refractive changes. The kinetic parameters and affinities were determined using BIAEVALUATION software.

[0249] The results of the BIACORE® assays are shown in FIGS. 7 and 35 and in Table 5. HERCEPTIN® (trastuzumab) and the HERCEPTIN® SMIP bound monomeric and dimeric HER2 receptors similarly in both orientations of the BIACORE® assay. HER095 bound monomeric HER2 at sub-nanomolar affinity. In contrast, the HER067, HER033, HER030/HER094, HER 146, HER116 and HER102SMIPS bound more strongly to dimeric soluble HER2 recpetor than to monomeric HER2 receptor. The HER033 and HER067 SMIPs have the same amino acid sequence, but the difference between them is that the former is produced in HEK cells while the latter is produced in CHO cells. Binding by HER033 and HER067SMIPs is substantially the same. HER030 appears to bind less strongly than Her033/Her067 to the dimers. Specificity for dimeric HER2 may be advantageous in that such binders may have increased selectivity for tumors and may not bind, or show reduced binding to tissues that express low levels of HER2 and/or where ligand independent homodimer formation is limited. Such HER2 binders with reduced binding to non-tumor target tissues (e.g., cardiac tissues) may, thus, have fewer side effects including lower toxicity. In addition, a lack of binding to shed HER2 ectodomain would reduce the effective dose compared to a HER2-binding agent that has significant binding to shed ECD.

TABLE 5
BIACORE ® Affinity Data

| | Affinity (nM) at 25° C. | | | | | |
|---|---|---|---|---|---|---|
| | Herceptin | Her 018 | Her 033 | Her 067 | Her 030 | Her 146 |
| SIIS (Dimer) | 1.06 | 1.4 | 7.23 | 8.18 | 35.6 | 4.14 |
| 1.8 (Dimer) | 228 | 167 | 4.92 | 6.47 | 27.6 | 2.8 |
| 1.6 (Dimer) | NB | NB | NB | NB | NB | 4.2 |
| Her155 | 3.44 | 4.59 | 508 | ND | ND | 193 |
| (Monomer) | | | | | | |

NB—No Binding Observed
ND - not enough binding to fit

### Example 7

### BrdU and ATP Proliferation Assays

[0250] To 96-well plates, cells were added at 2.5×10³ cells/well (SKBR3, BT474, MDA-MB-453, MDA-MB-175) or at 5×10³ cells/well (MDA-MB-361). The next day, SMIPs were added to the cells at the desired concentration and then incubated at 37° C./5% CO₂ for 4 (SKBR3, MDA-MB-453, MDA-MB-361, MDA-MB-175), 5 (BT474), or 7 (MDA-MB-361) days. The day before cells were harvested, 5-bromo-2′-deoxyuridine (BrdU) is added to a final concentration of 0.1 mM and continued to incubate overnight at 37° C. After incubation, media was removed and then the cells were treated with ethanol-based fix solution (DELFIA® Cell Proliferation Kit, Perkin Elmer, Waltham, Mass.) at room temperature (RT) for 30 minutes. Fix solution was removed by aspiration, 100 μl/well anti-BrdU-Eu labeled antibody (0.5 mg/mL) was added, and the cells were incubated at RT for 2 hours. Cells were then washed 4 times with Tris-based DELFIA Platewash (300 μl/well/wash). DELFIA Inducer (with Triton® X-100, glycine, HCl, and chelator) was then added to the cells (200 μl/well) and incubated with shaking for 15 minutes at RT. Fluorescence was measured using Flex Station® 3 in Time resolved fluorescence mode (Molecular Devices, Sunnyvale, Calif.).

[0251] After the proliferation assay fluorescence reading, the DELFIA Inducer was removed by aspiration and Hoechst 33342 nuclear stain solution (Invitrogen, Carlsbad, Calif.) was added to the cells. Nuclear stain fluorescence was measured on an IN Cell Analyzer at 4× resolution.

[0252] Alternatively, we investigated anti-Her2 SMIP anti-proliferation activity in MDA-MB-361 cells as follows. MDA-MB-361 breast cancer cells were plated in 96-well format and treated with anti-Her2 or control reagents for indicated concentrations and times (24-96 hr). For proliferation assays, media (DMEM plus 10% FBS) was removed, the cells washed with phosphate-buffered saline (PBS), fixed with 4% paraformaldehyde and nuclei stained with DAPI (Molecular Probes). Stained nuclei were counted using Cellomics High Content assay measuring fluorescence at 360 nM. The results are shown in FIG. 38. For apoptosis assay, fixed cells were permeabilized by treatment with 0.2% Triton 100 in PBS prior to primary staining with mouse anti-cleaved PARP antibody (Cell Signaling Technologies) and secondary staining with goat anti-mouse IgG labeled with ALEXA488 (Invitrogen). Fluorescence was measured in Cellomics High Content assay at 488 nM.

[0253] ATP Lite First Step assay (Perkin Elmer) was used to assess cellular viability by measuring ATP levels via luminescence (ATP luciferase). To 96-well plates, cells were added at 2.5×10³ cells/well (SKBR3, BT474, MDA-MB-453, MDA-MB-175) or at 5×10³ cells/well (MDA-MB-361). The next day, SMIPs were added to the cells at the desired concentration and then incubated at 37° C./5% CO₂ for 4 (SKBR3, MDA-MB-453, MDA-MB-361, MDA-MB-175), 5 (BT474), or 7 (MDA-MB-361) days. After SMIP incubation for the desired amount of time, lyophilized ATP Lite substrate is reconstituted with 10 ml of ATP Lite substrate/lysis solution and allowed to sit at room temperature for 10 minutes. This reconstituted substrate solution was added to the cells (100 μl/well) and read luminescence on Top Count Reader (Packard).

[0254] The results of the proliferation assays are shown in FIGS. 10-12 and FIGS. 36-38 and are summarized in FIG. 39. As shown in the Figures, the anti-HER2 SMIPS represent different groups of HER2 binders that bind different domains of HER2 and having differential ability to decrease proliferation in multiple cell lines. As shown, anti-HER2 SMIPS reduce proliferation of a different repertoire of cell lines than HERCEPTIN®, the SMIP form of HERCEPTIN® has a different repertoire of cell killing than the parent antibody and HER2SMIPS differ from each other in the cell lines in which they reduce proliferation.

### Example 8

### Pathway Phosphorylation Assays

[0255] To 96-well plates, cells were added at 8−12×10³ cells/well depending on cell type (Becton-Dickinson, San Jose, Calif.) and allowed to incubate overnight in growth medium with serum at 37° C./5% CO₂. After removal of growth medium, the cells were washed with serum-free medium, aspirated, and then serum-free media was added for incubation at 37° C./5% CO₂ for 3 hours. The SMIP of interest was prepared in prewarmed serum-free media, added to each well at the indicated concentration, and incubated at 37° C./5% CO₂ for desired time points. As a control, signaling was inhibited with AG825 (Calbiochem, LaJolla, Calif.) at 40 μM; LY294002 (Cell Signaling) at 50 μM; or U0126 MEK1/2 inhibitor (Cell Signaling) at 10 μM. The cells were then fixed in formaldehyde (diluted in 1×PBS) at a final concentration of 3.7% for 10 minutes at 37° C./5% CO₂. The cells were then washed two times with PBS. After removing the PBS, the cells were permeabilized in 0.1% Triton® X-100 (Sigma-Aldrich, St. Louis, Mo.) solution diluted in 1×PBS at room temperature for 5 minutes. The cells were then washed two times with PBS and blocked by incubation in PBS/1% BSA (Sigma-Aldrich) at room temperature for 30 minutes (or overnight at 4° C.).

[0256] The blocking solution was removed and primary antibody (in PBS with 3% horse serum or PBS with 1% BSA, and 0.1% Triton® X-100) was added for 1 hour at room temperature (or overnight at 4° C.). The primary antibodies used (at 0.125 μg/well) were (1) rabbit anti-phospho-akt (Ser473) (Cell Signaling, Danvers, Mass.); (2) mouse anti-phospho-Erk1/2 (Cell Signaling, Danvers, Mass.); and (3) rabbit anti-phospho-ErbB2 (Abgent, San Diego, Calif.). The primary antibody was removed and the cells were washed 3 times with PBS. The secondary antibody (in PBS with 3% horse serum or PBS with 1% BSA, and 0.1% Triton® X-100) was then added for 1 hour at room temperature (or overnight at 4° C.) protected from light. The secondary antibodies used (at 0.2 μg/well) were Alexa 488 donkey anti-rabbit IgG (Invitrogen, Carlsbad, Calif.) and DyLight 649 goat anti-ms IgG (Pierce, Rockford, Ill.). The secondary antibody was removed and the cells were washed 3 times with PBS. Then 100 μL of PBS containing 200 ng/ml Hoechst 33342 nuclear stain (Invitrogen, H3570) (and if needed 1 ug/ml CellMask Blue cytoplasmic stain (Invitrogen, H34558) was added to the cells. The plates were covered and kept protected from light. The plates were then imaged.

[0257] Alternatively, we investigated anti-Her2 SMIP signal transduction activity in MDA-MB-361 cells as follows. MDA-MB-361 breast cancer cells, were plated in 6-well plate to 80-90% confluency (DMEM plus 10% FBS) and treated with anti-Her2 or control reagents for 24 hr with and without pretreatment with Heregulin (HRG−15 min.) or EGF (30 min.). For assay of total and phosphorylated Her2, cells were lysed, 50 ug total protein was fractionated using SDS-PAGE and transferred to nitrocellulose membranes using standard procedures. Western blot analysis used either rabbit anti-Her2 antibody (Cell Signaling Technologies), anti-pHer2_Y1248 (Upstate) or anti-Actin (Santa Cruz) as primary antibody and subsequently stained with HRP-conjugated anti-rabbit IgG. Peroxidase activity was measured using ECLplus2 kit (GE Healthcare) following manufacturer's protocols and exposed to film. As shown in FIG. 13, HER033 induces HER2 phosphorylation.

[0258] To measure increased downstream phosphoprotein signal transduction, MDA-MB-361 breast cancer cells were plated in 96-well format and treated with anti-Her2 or control reagents for the concentrations and times (10 min to 24 hr) shown in FIG. 15. Media was removed, cells washed with PBS, fixed with 4% paraformaldehyde, and permeabilized with 0.2% Triton 100/PBS. Cells were subsequently stained with either rabbit anti-pAKT (Cell Signaling Technologies), anti-pERK (Cellomics), anti-pS6K (Cell Signaling Technologies), or anti-p38MAPK (Cell Signaling Technologies). Following PBS wash (3×), cells were stained with secondary goat anti-rabbit IgG antibody labeled with ALEXA594. Cell fluorescence was quantified using Cellomics High Content assay at 594 nM.

[0259] Her067 (Her033) has agonistic activity (increased signaling) compared to trastuzumab (see Table 6). Moreover, Her067 and Her018 are generally a stronger inducer of Her2, Erk1/2, and Akt phosphorylation than trastuzumab. The increase was statistically significant as compared to the mock treatment when measured by the pairwise student T-test (<0.001).

TABLE 6
Induction of phosphorylation by HER018, HER067,
Herceptin and Heregulin

| MDA-MB-361 (JL) | HER018 | HER067 | Herceptin | Heregulin |
|---|---|---|---|---|
| phospho-ErbB2 | ++ | ++ | + | + |
| phospho-Erk1/2 | + | ++ | + | + |
| phospho-Akt | + | + | + | ++ |

[0260] We next investigated the effect of inhibiting kinase activity on SMIP anti-proliferative activity. Briefly, we seeded MDA-MB-361 breast cancer cells into 96-well plate format and grew them 48 hr in DMEM media plus 10% FBS. We then treated the cells either with 0.3 ug/ml of Her146 SMIP or vehicle (control). We additionally co-treated both Her146 and vehicle treated cells with the indicated dose of kinase inhibitor (for MEK:CL-1040 (PD184352); and for ERK1/2: FR180204). Cells were grown an additional 90 hr, media removed and fixed (4% paraformaldehyde) and stained with DAPI according to manufacture's protocol (Molecular Probes) and nuclei of viable cells counted using Cellomics High Content assay.

[0261] The results are shown in FIGS. 40 and 41. Her146 mediated anti-proliferative activity is demonstrated by decrease in viable cell count in absence of co-treatment with the kinase inhibitor. Inhibition of MEK with small molecule kinase inhibitor CL-1040 between 0.4 and 3.7 uM demonstrate dose dependent reversal of the Her146 mediated anti-proliferative activity, demonstrating that Her146 activity is mediated by hyperactivation of MEK kinase pathway activity. Higher doses of CL-1040 inhibited cell proliferation by complete inhibition of MEK kinase activity. Similarly, inhibition of ERK1/2 activity (downstream target of MEK) with small molecule kinase inhibitor FR180204 demonstrates dose dependent reversal of the Her146 mediated anti-proliferative activity, demonstrating that Her146 anti-proliferative activity is mediated by hyperactivation of MEK/ERK pathway.

[0262] We also used siRNA against ERK1 or ERK2 to investigate the effect on SMIP anti-proliferative activity in MDA-MB-361 breast cancer cells. Briefly, the cells were reversed transfected with siRNA oligos (25 nM) targeting ERK1 or ERK2 kinases, or with non-targeting control oligo (NTO) using Dharmafect 4 lipid and following manufacture's recommended protocols in 96-well plate format. Cells were grown 60 hr in DMEM media plus 10% FBS and then treated with either Her146 (0.3 ug/ml) or vehicle control as indicated. Cells were then grown an additional 36 hr and media removed and cells fixed (4% paraformaldehyde) and stained with DAPI according to manufacture's protocol (Molecular Probes) and nuclei of viable cells counted using Cellomics High Content assay. Viable cell counts from two individual experiments are shown graphically in FIG. 42 as open or hatched bars. Treatment of MDA-MB-361 cells with Her146 in the presence of non-targeting siRNA (NTO) resulted in inhibition of cell proliferation. siRNA mediated knockdown of ERK1 kinase did not substantially alter the Her146 mediated anti-proliferative activity. In contrast, siRNA mediated knockdown of ERK2 kinase significantly reversed the Her146 antiproliferative activity. These data are consistent with reversal of Her146 anti-proliferative activity mediated by pharmacological inhibition of MEK or ERK1/2 and support the conclusion that these are the result of on-target activities. In addition, the results indicate that the hyperactivation of ERK2 but not ERK1 is responsible for cellular anti-proliferative activity of Her146.

[0263] We further investigated the duration of HER2 phosphorylation by anti-HER2 SMIP. Briefly, MDA-MB-361 breast cancer cells were grown in DMEM media supplemented with 10% FBS. Cells were treated with either anti-Her2 SMIPs (Her033, Her146), Herceptin or controls anti-CD20 SMIP or untreated. Additionally, cell populations were either treated with heregulin (HRG1), the ligand activator of Her3, or vehicle for a total of 24 or 48 hr. Cells were harvested and protein lysates size fractionated by SDS-PAGE, and transferred to nitrocellulose membranes. Protein blots were probed with anti-pHer2 (Upstate), anti-pHer3 (Cell Signaling Technologies) or anti-Actin (Santa Cruz, loading control) monoclonal antibodies. Blots were subsequently stained with goat anti-rabbit IgG_coupled to horseradish peroxidase (Santa Cruz) and visualized by ECL staining (GE) following manufacture's protocol. As shown in FIG. 43, Her0146 mediates long term (48 hr) hyperactivation of Her2 phosphorylation in MDA-MB-361 breast cancer cells.

### Example 9

### Cell Cycle Assay

[0264] To investigate the effect of the ErbB2 ECD binder on cell cycle in HERCEPTIN® sensitive and HERCEPTIN® resistant cells, each well of a 6 well plate was seeded with 2×10⁵ cells (SKBR3 or BT474 (sensitive) or MDA-MB-453 or MDA-MB-361 (resistant)) and incubated overnight at 37° C./5% CO₂. Cells were then treated with antibody or SMIP (at 10 μg/ml final) (in triplicate) and incubated for another 24 or 48 hours. After incubation, the cells were pulsed with 50 uM BrdU (Sigma) for 30 minutes at 37° C., the media was removed, and the cells were treated with trypsin and harvested in a FACS tube on ice. The cells were washed with PBS, fixed with 70% cold ethanol, and incubated on ice for 30 minutes. The ethanol was removed and then 2N HCl/0.5% Triton X-100 was added, and the cells were incubated for 30 minutes at room temperature (RT). The acid was removed and neutralized with 0.1 M Na₂B₄O₇ for 15 min at RT. The neutralization buffer was removed, FITC labeled anti-BrdU antibody was added (BD Bioscience) in PBS/0.5% TWEEN® 20/1% BSA, and the cells were incubated for 30 minutes at RT in the dark. The FITC dye was removed, the cells washed, and then DAPI nuclear stain (Invitrogen) and RNAse A (Qiagen) each at 1:1000 dilution was added and the cells were incubated 15 minutes in the dark and then analyzed by FACS. Statistical analysis of the data was performed using ANOVA and Student's t-test.

[0265] The results are presented in FIGS. 17 and 18. We observed an increased number of cells in the G1 phase in HERCEPTIN® treated SKBR3, BT474 and MDA-MB-453 cells. Among cells treated with HER033SMIP, we observed an increased number of cells in S phase in SKBR3 and BT474 cells.

[0266] Additional results are presented in FIGS. 44A-B and 45A-E. Our results demonstrated that SMIPs have different effects on the cell cycle than Herceptin. While both Herceptin and SMIPs inhibited proliferation in SKBR3 and BT474 cells after 24 hours, Herceptin induced G1 arrest and SMIPs induced S-phase arrest. Additionally, while Herceptin did not inhibit cell cycle progression in MDA-MB-453, MDA-MB-361 (JL), and MDA-MB-361 (ATCC) cells after 24-48 hours, SMIP treatment inhibited the cell cycle by inducing G1 arrest. The cell cycle inhibition was not observed in MDA-MB-361 (ATCC) until 48 hours, but these cells grow slower than the other cell lines. Finally, HER116 appeared to behave a little differently than HER030/094, HER033/067, and HER146.

[0267] Specifically, we observed a decreased number of cells in the G1 phase in HER033, HER067, HER102, HER122 and Heregulin treated SKBR3 cells and in HER033, HER067, HER146, HER102, HER122 and Heregulin treated BT474 cells. We also observed an increased number of cells in the G1 phase in Herceptin® treated SKBR3 and BT474 cells; HER033, HER067, HER146, and HER116 treated MDA-MB-453 cells at 24 hours; HER033, HER067, and HER146 treated MDA-MB-361 (JL) cells at 24 hours; HER094, HER067, and HER146 treated MDA-MB-361 (JL) cells at 48 hours; Herceptin treated MDA-MB-361 (ATCC) cells at 24 hours; and HER094, HER067, and HER146 treated MDA-MB-361 (ATCC) cells at 48 hours.

[0268] Treatment with HER094, HER0333, HER067, HER146, HER116, HER124, and Heregulin resulted in an increase in the number of SKBR3 cells in S-phase at 24 hours. Treatment with HER018, HER094, HER033, HER067, HER146, HER116, HER102, HER124, and heregulin increased the number of BT474 cells in S-phase at 24 hours. We also observed an increase the number of cells in S-phase in Heregulin treated MDA-MB-361 (JL) cells at 24 hours; and HER018 and Heregulin treated MDA-MB-361 (ATCC) cells at 48 hours.

[0269] We observed a decreased number of cells in S-phase in Herceptin® treated SKBR3 and BT474 cells; HER067 treated MDA-MB-453 cells; HER033 and HER067 treated MDA-MB-361 (JL) cells at 24 hours; HER094, HER033, HER067 and HER146 treated MDA-MB-361 (JL) cells at 48 hours; and HER146 treated MDA-MB-361 (ATCC) cells at 48 hours.

[0270] HER067, HER146, and HER116 treatment decreased the number of SKBR3 cells in G2M phase. HER018, HER094, HER033, HER146, HER116, HER102, and heregulin decreased the number of BT474 in G2M phase. Alternatively, out of the Herceptin-resistant cell lines, only MDA-MB-361 (ATCC) cells at 48 hours showed significantly decreased G2M phase cells following SMIP treatment (HER094, HER067, HER146 and heregulin).

### Example 10

### In Vivo Xenograft Assay

[0271] To investigate the effect of the ErbB2 binding molecules of the invention in vivo, we tested the molecules in three mouse models.

[0272] SCID/Beige Mouse Model

[0273] Female (6-7 week old) Beige SCID mice (Beige SCID CB-17/IcrHsd-Prkdcscid-Lystbg) were obtained from Harlan Sprague Dawley, N.J. Virus free MDA-MB-361 cells were thawed from a new vial and cultured to generate appropriate numbers. Cells were grown to near confluency and had a viability of >90%. Cells were harvested, washed twice with sterile PBS, resuspended to 2×10⁸ cells/ml, then combined with Matrigel 1:2. and kept on ice until injection.

[0274] Tumor Cell Implantation and Monitoring: Each mouse was injected with 100 μl of the cell/Matrigel suspension (1×10⁷ cells) subcutaneously on the right flank. Mice were monitored daily for tumor growth. Tumors were established when they reached about 150 to about 300 mm³ (Volume=½[length×(width)²). Tumors developed in 100% of the implanted mice. Mice were sorted into groups according to tumor size, keeping means consistent among groups using LabCat software. Sorting occurred on day 0, which was the same day the mice received their first treatment.

[0275] Mice were monitored (i.e., weighed and tumors measured) two to three times weekly. Mice were sacrificed if ulceration of tumor occurred, extreme body weight loss (greater than or equal 20%), tumor exceeded about 1200 to about 1500 mm³, or tumor inhibited mobility of a mouse. The study is continued for a total of about 60 days.

[0276] Treatment: Mice were sorted into three groups of 11 mice each. Treatment began on day 0 (about six days after cell implantation). Each mouse of a group received intraperitoneal treatments twice a week (for a total of five treatments), which were given in equimolar amounts (900 nM) of (1) SMIP HER067 (100 μg), (2) Herceptin (136 μg, positive control), or (3) human IgG (136 μg, negative control). Survival and tumor size was recorded two to three times weekly. Results were graphed (+/−SEM) and analyzed using Prism software (see FIGS. 21 and 22).

[0277] In a subsequent experiment, mice were sorted into 4 groups: (1) HER146 (100 μg), (2) HER116 (100 μg), (3) Herceptin (136 μg, positive control) and (4) human IgG (136 μg, negative control). Survival and tumor size was recorded two to three times a week. Results were graphed (+/−SEM) and analyzed using Prism software (see FIGS. 46 and 47)

[0278] BALB/c nu and nu/nu Mouse Models

[0279] Male BALB/c nu/nu (nude) mice (18-23 g) and female nu/nu (nude) mice (18-23 g) were obtained from Charles River Laboratories, Wilmington, Mass.

[0280] Subcutaneous BCL Xenografts:

[0281] Female, athymic nude mice were exposed to total body irradiation (400 rads) to further suppress their residual immune system and facilitate the establishment of xenografts. Three days later, the irradiated mice were injected subcutaneously (SC) with 1×10⁷ MDA-MB-361 cells in Matrigel (Collaborative Biomedical Products, Belford, Mass., diluted 1:1 in culture medium) in the dorsal, right flank. When the tumors reached the mass of 0.1 to 0.25 g, the tumors were staged to ensure uniformity of the treatment groups. Male, athymic Balb/c nude mice were injected s.c. with 1×10⁷ cells in the right flank. When tumors reached an average tumor mass of 0.1 to 0.25 g, the tumors were staged to ensure uniformity of the treatment groups. Mice were dosed with compounds (100 μg/mouse ip) on days 1, 4, 6, 8 and 11 (n=10 mice/treatment group). All compounds were administered ip. Tumors were measured at least once a week and their mass (±SEM) was calculated. Tumor mass for each treatment group was compared to that from the vehicle-treated group for statistical significance using ANOVA and subsequent pairwise comparisons to the vehicle-treated group using a one-tailed t-test with the error term for the t-test based on the pooled variance across all treatment groups. The results are shown in FIGS. 19, 20, 48A-D and 49A-D.

[0282] The preliminary results in vivo as shown in FIGS. 46 and 47, however, indicate that HER116 was not efficacious against MDA-MB-361 (JL) xenografts in SCID-Beige mice and did not improve survival compared to negative control. These data correlate with other data herein that show that HER116 appears to lack in vitro anti-proliferation activity against MDA-MB-361 (JL) cells. HER146, on the other hand, was efficacious against MDA-MB-361 (JL) xenografts in SCID-Beige mice but demonstrated slower tumor regression than the positive control. Despite slower tumor regression, HER146 treated mice had better overall survival and tumor free progression than Herceptin (positive control) treated mice.

[0283] Based on the in vitro and in vivo results taken as a whole, the anti-ErbB2 binding proteins are believed to be efficacious in treating tumors.

### Example 11

### Identification and Screening of Antibodies that Bind to the Membrane Proximal Region of Her2/ERBB2

[0284] Ligand binding triggers ERBB2 dimerization and the activation of the intracellular kinase domain of ERBB2. Autophosphorylation of C-terminal tyrosines triggers the recruitment to these sites of intracellular signal transducers that regulate cellular processes such as proliferation, differentiation, motility, adhesion, protection from apoptosis, and transformation.

[0285] ERBB2 is frequently over-expressed in breast cancer. The existence of high levels of circulating soluble ERBB2 extracellular domain is associated with poor prognosis and decreased responsiveness to chemotherapy and endocrine therapy. In cell cultures, it has been shown that soluble ERBB2 extracellular domain arises by proteolytic cleavage of the extracellular domain of ERBB2. The cleavage of the extracellular domain results in a truncated, cell-associated, ERBB2 fragment that contains the intracellular kinase domain and a potentially surface-exposed N-terminal membrane proximal sequence, EQRASPLTSIIS (amino acid residues 645-656 of HER2). This membrane-bound fragment (designated as ERBB2 p95 because of its molecular weight) shows potentially enhanced signalling activity. It has been speculated that the adverse prognosis observed in patients with high levels of ECD/ERBB2 may be related, at least in part, to an increase of truncated, signalling-competent, ERBB2 p95.

[0286] Because the N-terminal membrane proximal sequence, EQRASPLTSIIS (referred here as the “stumpy” region) potentially remains on cell surface after the proteolytic cleavage of the extracellular domain, the stumpy region is a potential target for therapeutic intervention. For example, Herceptin® (Trastuzumab), as part of a treatment regimen containing doxorubicin, cyclophosphamide, and paclitaxel, is indicated for the adjuvant treatment of patients with ERBB2-overexpressing, node-positive breast cancer. However, Herceptin does not bind to the stumpy region of ERBB2. In contrast, an antibody that bind to the stumpy region of ERBB2 would be a more potent and effective inhibitor of the truncated, signalling-competent, ERBB2 p95.

[0287] Selection of scFvs that Bind to the “Stumpy” Region by Phage Display

[0288] Single chain fragment variable (scFv) moieties that bind to the membrane-proximal region of Her2 (ErbB2) that remains on the cell surface following cleavage and release of the soluble extra-cellular domain were identified following three rounds of selection using the Cambridge Antibody Technology (CAT) phage display libraries. Selection strategies are outlined in FIG. 5. Three CAT libraries were used; the Bone Marrow Vaughan (BMV) library (Vaughan et al, 1996), the combined spleen (CS) library and the DP47 library (unpublished). The “stumpy peptide” and “scrambled peptide” (FIG. 5A), each expressed with a biotin tag, were used during the selection and these peptides along with two Her2-Fc fusion proteins were used during the subsequent screening steps (see Table 3). The EKK sequence at the C termini of the stumpy peptide and scrambled peptide is predicted to maintain the helical structure predicted from the NMR (see, Goetz et al., 2001. Biochemistry 40: 6534-6540). For selections, aliquots of phage and magnetic streptavidin beads (Dynabeads M-280 streptavidin) were blocked separately in 3% milk/PBS for 1 hour at room temperature in a rotary mixer (20 rpm). Blocked phage were incubated with a 100 nM concentration of the scrambled de-selection peptide in round 1 (the amount of de-selection peptide decreased in subsequent rounds as the concentration of the selection peptide decreased), incubated at room temperature for 1 hour on a rotary shaker (20 rpm), mixed with blocked magnetic beads and incubated for a further hour. The de-selected library was collected by pelleting the beads using a magnetic separator. Biotinylated selection peptide (at various concentrations as indicated in FIG. 5A) was incubated with the de-selected phage library for 2 hours at room temp on a rotary mixer (20 rpm) followed by a 15 minute incubation with pre-blocked magnetic beads. Beads were separated using a magnetic separator and washed 10 times with PBS/0.1% Tween 20 and 3 times with PBS. Bound phage were eluted by incubation with a 10 ug/ml solution of trypsin in PBS for 30 minutes at 37° C. (100 rpm) followed by separation from the magnetic beads.

[0289] Eluted phage were used to infect 10 ml of an E. coli TG1 culture that had been grown to mid-logarithmic phase (corresponding to an OD₆₀₀ of ˜0.5). Bacteria were infected with phage for 1 hour at 37° C. with shaking at 150 rpm, concentrated following a centrifugation step and plated on 2×TY agar bioassay plates containing 2% glucose and 100 ug/ml ampicillin (2×TYAG). Various dilutions of E. coli culture infected with either input or output phage were also plated on 2×TYAG agar to determine phage titers. Following overnight growth at 30° C., 10 ml of 2×TYAG medium was added to each bioassay plate and the cells were re-suspended by scraping the bacterial lawn. Glycerol was added to this cell suspension to give a final concentration of 17% and stored in aliquots at −80° C. until further use. In order to rescue phage for the next round of selection, 100 μl of this cell suspension was used to inoculate 20 ml 2×TYAG medium, which was grown at 37° C. (300 rpm) to an OD₆₀₀ of 0.3-0.5. Cells were then super-infected with 3.3 μl of MK13K07 helper phage and incubated at 37° C. (150 rpm) for 1 hour. The cells were then centrifuged and the pellet re-suspended in a kanamycin/non-glucose containing medium (2×TY with 50 μg/ml kanamycin and 100 ug/ml ampicillin). This culture was grown overnight at 30° C. (300 rpm). Phage were harvested in the supernatant following centrifugation and were ready to use in the next round of selection as described above.

### Example 12

### ELISA to Measure Binding of scFvs Expressed in the Periplasm or Purified to Biotinylated Her2 Protein Constructs

[0290] A streptavidin-coated 96 well plate (Greiner) was washed three times with PBS/0.05% Tween 20 and blocked for 1 hour at room temperature in 3% skim milk/1% BSA/PBS. Plates were washed three times with PBS/0.05% prior to the addition of a 1 mg/ml solution of biotinylated Her2-Fc proteins (Her008P, Her017P, Her018P, Her054P) or a biotinylated negative control murine IgG2a protein. Plates were incubated for one hour at room temperature. Peripreps were prepared as described in an earlier section and were blocked for 1 hour at room temperature in an equal volume of 6% skim milk/1% BSA/PBS. Blocked plates were washed five times with PBS/0.05% Tween 20 and 50 ml/well of blocked periprep (or purified scFv diluted in block buffer) were transferred to the appropriate plates and incubated for 1 hour at room temperature. A 1 ug/ml solution of Herceptin (in blocking buffer) was added to well H12 of each plate to serve as a positive control. Plates were washed five times with PBS/0.05% Tween 20 prior to the addition of a 1:250 dilution of anti-myc peroxidase (Roche) or a 1:5000 dilution of goat anti-human peroxidase (Southern Biotech) secondary antibody to detect bound scFv or Herceptin respectively. Plates were incubated for a further hour at room temperature and washed seven times with PBS/0.05% Tween 20. Signal was developed using TMB, the reaction stopped with H2SO4 and the absorbance read at 450 nm on an Envision plate reader (Perkin Elmer).

### Example 13

### Conversion of scFᵥ to IgG

[0291] Heavy and light chain V regions from scFv clones are amplified with clone-specific primers. PCR products are digested with appropriate restriction enzymes and subcloned into vectors containing human IgG1 heavy chain constant domain (for V_{H} domains) or vectors containing human lambda or kappa light chain constant domains as appropriate (V_{L} domains). The closest human germlines of the V_{H} and V_{L} segments are determined and this information is used to indicate whether kappa or lambda light chain constant domains are used. Correct insertion of V region domains into plasmids is verified by sequencing of plasmid DNA from individual E. coli colonies. Plasmids are prepared from E. coli cultures by standard techniques and heavy and light chain constructs are co-transfected into COS cells using standard techniques. Secreted IgG is purified using protein A sepharose (Pharmacia) and buffer exchanged into PBS.

### Example 14

### Effect of SMIPS on HER2Surface Expression and Ectodomain Shedding

[0292] To investigate the effect of SMIPs on Her2 surface expression and ectodomain shedding, 200,000 SKBR3 cells/well were plated in 24-well tissue culture plates and incubated overnight. The next day, the media was carefully removed and the cells were incubated for 24 hours with fresh media containing 10 ug/ml SMIPs (Her067, Her094, Her102, Her116, Her146 or Her018) or molar equivalent of antibody (HERCEPTIN® as a positive control, or Retuxan as a negative control). The table below shows the SMIPs and antibodies that were used. As additional controls, cells were also treated with either 1 nM pervanedate to increase ectodomain shedding, or 5 ug/ml TIMP1a protease inhibitor that results in blockage of Her2 cleavage.

| SMIP/antibody (lot#, concentration) | |
|---|---|
| HER067 (InVivo 1566JK93 4.57 ug/ul) | HER033 |
| HER094 (InVivo 1714MM20 5.27 ug/ul) | HER030 |
| HER102 (InVivo 1681JK50 2.99 ug/ul) | |
| HER116 (InVivo 1714MM16 3.33 ug/ul) | |
| HER146 (InVivo 1714MM18 3.62 ug/ul) | |
| HER018 (1464JK49 5.75 ug/ul) | 4D5 SMIP |
| Herceptin (N42442 1688RAC33 2 ug/ul) | (+) Control for blocking |
| | cleavage |
| Rituxan (N36493 2 ug/ul) | (−) Control i.e. no |
| | binding/effect |
| Pervanedate (1 mM) | Increases ectodomain |
| | shedding |
| TIMP1 (5 ug/ml) | Block Her2 cleavage |

[0293] The levels of shed Her2 ECD in the supernatant was determined by ELISA. After 24 hours supernatants were harvested and the amount of shed Her2 ectodomain determined by ELISA, using HERCEPTIN® to capture shed ectodomain and anti-Her2 TA-1 antibody to detect the captured ectodomain. Cells were harvested using trypsin and cell surface Her2 was determined by flow cytometry by staining with the SMIP or antibody used for the treatment. Levels of Her2 were determined and compared to untreated cells stained with the same SMIP or antibody.

[0294] HERCEPTIN® treated cells were not detected by ELISA. As shown in FIGS. 50A and 50B, SMIPs decrease shedding of the Her2 ectodomain. As shown in FIGS. 50C and 50D, anti-HER2SMIPs of the invention decrease cell surface Her2.

[0295] Without being bound by theory, the mechanism for SMIPs' decreasing cell surface Her2 and shedding Her2 ectodomain may be that the SMIP blocks Her2 cleavage, thus reducing shed ectodomain and production of p95 Her2. Alternatively, SMIPs could increase Her2 internalization, thus reducing cell surface ECD. Similar mechanisms have been described for HERCEPTIN®.

### Example 15

### Anti-HER2SMIP Cross-Blocking

[0296] To investigate the ability of Her2 SMIPs and antibodies to block each other's binding to cell surface Her2, cross-blocking was investigated using FMAT blocking buffer. SMIPs were labeled with FMAT Blue as per manufacturers directions (Applied Biosystems). Unlabeled competitor SMIPs or Antibodies were diluted to 400 nM in FMAT Blocking Buffer (44 ug/mL for SMIPs; 59.2 ug/mL for antibodies). Each protein was titrated 1:3 in FMAt blocking buffer in duplicate V-bottom tissue culture 96-well plates in a final volume of 60 ul/well. Cells (SKBR3) were added in 60 ul FMAT blocking buffer to give 36,000 cells/well. Plates were incubated for 1 hour at room temperature before adding FMAT Blue labeled antibodies at a concentration determined to give maximal staining in the absence of competing unlabeled SMIP or antibody (5 ug/mL for HERCEPTIN®; 2 ug/mL for HER018, 10 ug/mL for all other HER SMIPs, and 2 ug/ml for Rituxan and 2LM20-4 (anti-CD20 SMIP)). Plates were incubated at room temperateure for 45-60 minutes (10 minutes for Herceptin). Cells were spun down at 1250 rpm for 5 minutes and non-bound SMIPs and antibodies flicked off. Cells were resuspended in 120 ul FMAT Blocking Buffer and transferred to FMAT 96-well plates. Cells were allowed to settle for 5 minutes before being read on FL1 AB3200. The average of each duplicate value of FMAT staining was determined for each concentration of competing unlabeled protein.

[0297] Cross-blocking between Her2 SMIPs and antibodies is not necessarily indicated by epitope mapping. SMIPs and antibodies that bind different epitopes could nevertheless block each other due to binding stoichiometry and molecular size. FIG. 51 shows a summary of the Her2 binding site possibilities for various SMIPs.

[0298] HERCEPTIN® binding is blocked by HERCEPTIN® and HER018 at low concentrations; HER067, HER102, HER146 at higher concentrations; and HER094 at very high concentrations. HER018 binding is blocked by HER018 and HERCEPTIN® at low concentrations; HER067, HER102, HER146 at higher concentrations; and HER094 at very high concentrations. HER067 binding is blocked by HERCEPTIN® and HER018 at low concentrations; HER067 and HER102 at higher concentrations; and HER094 and HER146 at very high concentrations. Also, HER067 binding is greatly enhanced by HER116 binding.

[0299] HER094 binding is blocked by HERCEPTIN® and HER018 at low concentrations; HER067 and HER102 at higher concentrations; and HER094 and HER146 at very high concentrations. Also, HER094 binding is greatly enhanced by HER116 binding.

[0300] HER102 binding is blocked by HERCEPTIN® and HER018 at low concentrations; and HER146 and HER102 at higher concentrations. Also, HER102 binding may be slightly enhanced with HER116 binding.

[0301] HER116 binding is blocked by HER116 at low concentrations. No other SMIPs or antibodies blocked HER116 binding. HER146 binding is blocked by HERCEPTIN®, HER018 and HER102 at low concentrations; and HER146 at higher concentrations. Anti-CD20 Ab and SMIP binding is not blocked by any HER2SMIPs or antibodies.

[0302] The SMIP cross-blocking results are summarized in FIG. 52.

[0303] Importantly, Her2 SMIPs that do not cross-block each other have the potential to simultaneously bind to a Her2 molecule. Accordingly, there may be an additive mechanism of action for Her2 binding with SMIPs and antibodies. Further, there is a possibility for a combination treatment with multiple SMIPs or with a combination of SMIP and antibody. SMIPs could also be potential partners for bispecific molecules such as Scorpions™.

### Example 16

### Anti-HER2SMIP Internalization Assay

[0304] We investigated the ability of anti-HER2SMIPS of the invention to internalize in various cell lines as follows.

[0305] Hum-ZAP Internalization Assay

[0306] Hum-ZAP (Advanced targeting Systems) is a saporin-conjugated anti-human Ig that targets and eliminates cells using the internalization of an antibody or SMIP. Upon binding to a human IgG containing molecule, such as a SMIP or antibody, that recognizes an extracellular domain of a cell surface antigen, Hum-ZAP is taken inside the cell by antibody or SMIP-mediated internalization. The entrance of saporin into the cell will result in protein synthesis inhibition and eventual cell death after 2-4 days.

[0307] Cells in 90 μl of media (at a concentration of 2.5−5.0×10³ cells/well) were added to 96-well plates and incubated overnight. The following day, cells were treated by either: a) the addition of 5 μl of a SMIP and media; b) the addition of 5 μl goat IgG-SAP (goat anti-human IgG negative control) and media; or c) the addition of 5 μl of a SMIP and Hum-ZAP (Saporin-conjugated goat anti-human IgG). Cells were incubated a further 96 hours before being assayed for proliferation using standard BrdU-incorporation and Hoechst nuclear staining. Internalization was observed as a reduction in cell proliferation an plotted as percent of untreated control.

[0308] We observed that, of the SMIPs tested, HER116 was best internalized by cells—these results agree with the fluorescence internalization experiments with “stumpy” binders.

[0309] Stumpy binders (HER156 and HER169) were observed to internalize in MDA-MB-361 JL, MDA-MB-453, and BT-474 cells and, to some degree, in SKBR3 cells. In addition, all SMIPs were internalized to some degree in BT474 and SKBR3 cells.

[0310] No detectable SMIP internalization, however, was observed in JIMT-1 and MDA-MB-361 (ATCC) cells. This may be due to the fact that MDA-MB-361 (ATCC) cells grow slowly. Thus, longer treatment times with increased cell numbers may be necessary in order to detect a response.

[0311] Fluorescence Assay

[0312] MDA-MB-361 cells were grown in 96-well plate format and treated with anti-Her2 SMIPs, Herceptin (Herc) or control anti-CD20 SMIP for indicated times. Media was removed and cells fixed (4% paraformaldehyde) and permeabilized (0.2% Triton100). Cell surface or intracellular SMIPs or monoclonal antibodies were detected by staining with FITC-labeled anti-hulgG-Fc (see FIG. 53A-F, panels A and B or with rabbit anti-Her2 mAB (Cell Signaling Technologies) with secondary FITC-labeled Goat-anti-Rabbit IgG (Molecular Probes) (panel C). Fluorescent image detection was visualized by Cellomics High Content assay.

[0313] Her116 demonstrated rapid binding and internalization of SMIP (Panel A: 10 min; Panel B: 1 hr) and cell surface Her2 (Panel C: 1 hr) similar to Herceptin mAB. In contrast, Her 46 treatment demonstrated slower kinetics of cell surface binding that was sustained for longer time periods (Panel B: 1 hr) and confirmed with anti-Her2 cell surface localization (Panel C: 1 hr). Control anti-CD20 SMIP did not display binding at any time point as anticipated.

[0314] cypHER5E Assay

[0315] SMIPs and antibodies were labeled with CypHer5E (GE Healthcare) as per manufacturers direction. CypHer5E has little or no fluorescence at physiological pH, but fluoresces at low pH (e.g., when internalized into lysosomal compartments). Cells were plated in serum-free media and placed on ice for 5-10 minutes. Cells were then washed (1×) with cold media containing 1% FBS. Dilutions of CypHer5E labeled SMIPs or antibodies in ice cold serum-free media were added to cells and incubated on ice for 45 minutes. Cells were washed (1×) with ice cold media containing 1% FBS. Room temperature media containing 1% FBS (without phenol red, pH 7.6) and Hoechst nuclear stain (Invitrogen) were added to cells and the. Cells were then imaged using an InCell analysis System (GE Healthcare) using the 20× objective at 10 or 30 minute intervals for 2-4 hours. Cells were then fixed with formaldehyde, permeabilized, blocked and stained with an anti-human Alex-488 secondary mAb (anti-human IgG H+L, Invitrogen) and re-imaged on the InCell to verify SMIP or antibody binding. CypHer5E is imaged in the red channel (650-700 nm), Hoechst in the blue channel (387-525 nm) and the Alex-488 secondary antibody in the green channel (485-525 nm).

[0316] HER018 and HER116 were rapidly internalized—within 10 minutes. We confirmed the presence of SMIP binding after fixation with an anti-human Fc secondary Ab. The presence of SMIP binding was confirmed after fixation with an anti-human Fc secondary Ab. We found that HER067, HER146, HER156, and HER169 were internalized more slowly. We observed some internalization of these SMIPs by 4 hours. We found that Herceptin was internalized at a faster rate in SMIP format (HER018) than as Ab. In general, we found that “stumpy binders” were internalized over a longer period of time. Some had internalization by 4 hours. Without wishing to be bound by any theory, we believed that they could induce cell death over a period of days through internalizing of a co-incubated toxin-conjugated anti human secondary antibody.

### Example 17

### Effector Functions of Anti-HER2SMIPS

[0317] SKBR3 cells were harvested with trypsin and washed. Cells were labeled with BADTA (Perkin Elmer) by incubating 2×10⁶ cells in 2 ml media with 20 μl BADTA mix (5 μl BADTA reagent, 2 μl PF127, 13 μl DMSO) for 20 minutes at 37 C. Labeled cells were washed with PBS (4×) and resuspended in media at 400,000 cells/ml. Cells (20,000 cells in 50 μl) were aliquoted into a V-bottom plate and 50 μl of 2×SMIP or antibody were added. To a 50 μl aliquot of loaded target cells, 150 μl media were added and immediately spun down; background spontaneous release counts were determined in the 100 μl supernatant. To a second 50 μl aliquot, 150 μl 2% NP40 in media were added to lyse cells in order to determine maximum lysis. Effector cells (PBMC: peripheral blood mononuclear cells) were added to samples and incubated for 2 hours at 37 C. Plates were centrifuged to pellet cells/debris. Cleared supernatant (20 μl) was transferred to a flat bottom plate to which 200 μl of Europium solution was added and incubated for 15 minutes at room temperature while shaking. Fluorescence was measured (excitation 335 nm, emission 615 nm, cutoff 590 nm, delay 250 μs, and integration 1250 μs).

[0318] As shown in FIG. 54, HER116m HER033/067 and HER094 have good to moderate FcDCC activity that is comparable to that of HERCEPTIN® and HER018. In contrast, we observed no CDC activity with anti-HER2SMIPS, HERCEPTIN® or HLA ABC in SKBR3 cells (see FIG. 55) or MDS-MB-361-JL cells (data not shown).

### Example 18

### Serum Stability of Anti-HER2SMIPS

[0319] Stability of SMIPs in mouse plasma was determined by incubating SMIPs (200 ug/ml) in mouse plasma or PBS at 37 C or 4 C for up to 96 hours, with samples removed at intermediate times. A dilution series was made for each SMIP sample and the concentration was determined by ELISA using plates coated with a Her2 ECD murine Fc fusion protein (Her2SIIS::muFc). Captured SMIP was detected using a HRP-conjugated secondary anti mouse Fc secondary antibody. Mouse plasma alone or an anti-CD20 antibody, were used as negative controls in these experiments.

[0320] Results are shown in FIG. 56A. The effects of different incubation times and different temperatures had little effect on the binding of HER067 or HER 146 with Her2-SIIS at all of the concentrations tested. These results suggest that HER067 and HER146 are stable in plasma at physiologically-relevant temperatures and for extended periods of time. Repeat experiments that compared samples incubated in plasma with those that were incubated in PBS for 72 hr provided results that agreed with the first assay shown in (see FIG. 56B).

### Example 19

### Determination of Mass of Soluble HER2 Receptor-Binding Molecule Complex

[0321] In order to determine the binding ratios of SMIPs to Her2 receptors, the mass of Her2 receptor/binding domain complexes was analyzed. FIGS. 57A and 57B show predicted masses of various SMIP/receptor complexes. SMIP (or mAb) was mixed with a soluble Her2 receptor at a 3:1 Molar ratio (an alternate mixture with a SMIP:receptor Molar ratio of 1:3 was also used), and the mixture was incubated at room temperature overnight. The mixture volumes were then normalized to 110 μl, and 100 μl of the SMIP/receptor mixture were subjected to size-exclusion chromatography combined with refractive index, multiple angle laser light scattering (SEC-RI-MALLS), using a TOSOH TSK G4000 SW_{XL} column. The mass of the resolved peaks was analyzed using ASTRA software (Wyatt Technology Corporation, CA). The results of the mass analysis are shown in FIG. 58.

[0322] Our observations suggest that each Herceptin, HER018, and HER095 molecule binds two monomeric soluble Her2 receptors simultaneously. This binding appeared to be complete with 2 Her2 molecules per SMIP when the receptor was in 3× excess. In contrast, it appears that HER067 and HER146 can only bind one monomeric soluble Her2 receptor. This binding appeared to be incomplete/poor with 0 to 1 Her2 molecules per SMIP when the receptor was in 3× excess. The data also support that two Herceptin, HER018 or HER095 molecules can bind to each dimeric soluble Her2 receptor, when the SMIP was in 3× excess. Alternatively, it appears that only one HER067 or HER146 molecule binds each dimeric soluble Her2 receptor, even when the SMIP was in 3× excess.

### Example 20

### Drug Combination Studies

[0323] Cell cycle data suggested that MDA-MB-453 and MDA-MB-361_JL cells treated with Her146 and other SMIPs were driven into and through S-phase before being arrested in G1. The ability for SMIPs to sensitize cells to chemotherapeutic agents was determined by performing standard proliferation assays (BrdU incorporation and/or Hoechst nuclear staining) on cells treated with SMIP/antibody prior to treatment with chemotherapeutic agents (Cisplatin, Taxol, Doxorubicin or Gemcitabine). Cells (2500-5000 cells per 96 well) were treated with SMIP for 24 or 72 hours prior to the addition of chemotherapy. Cells were treated with the combination of SMIP/antibody and therapeutic an additional 24 hours before the cells were quantitated by counting cells using the nuclear stain, Hoechst, or by the ability of live cells to incorporate BrdU using standard assays. A 5-fold dilution series was run for each assay/treatment with a maximal concentration of SMIP of 182 nM and 100 uM Cisplatin, 100 nM Taxol, 1000 nM Doxorubicin, or 100 nM Gemcitabine with the ratio remaining constant for each dilution. The combination of SMIP and chemotherapy was compared to either SMIP or chemotherapy alone. Dose response curves of cells pre-treated with HER146 and then treated with various chemotherapeutic agents or combinations thereof are shown in FIG. 59A-D.

[0324] We found that Her2 SMIPs could have additive effects when administered with chemotherapeutic agents. For example, MDA-MB-453 cells treated with HER146 were more sensitive to chemotherapeutic agents (e.g., Cisplatin, Taxol, and Doxorubicin). MDA-MB-361-JL cells treated with Her146 were more sensitive to some chemotherapeutic agents (e.g., Cisplatin, Taxol, and Gemcitabine) but not others (e.g., Doxorubicin).

### Example 21

### Assessment of Target Binding Specificity

[0325] We investigated the target-binding specificity of the anti-HER2SMIPS referred to herein as “stumpy” binders by immunoprecipitation. Cells was solubilized in either Radio Immuno Precipitation Assay (RIPA) lysate buffer or Nonidet P-40 lysis buffer (a more gentle detergent than those in RIPA buffer) containing a cocktail of protease inhibitors. Cleared lysate protein concentrations were determined using a standard protein assay (e.g. Bradford assay). Her2 was immunoprecipitated from 1 mg RIPA lysate or 2 mg Nonidet P-40 lysate using 5 ug of SMIPs, 5 ug human IgG (as negative control) or 2 ug mouse monoclonal antibody, 3B5, against the intracellular region of Her2 (positive control). Immunoprecipitated protein is pulled down with protein A or protein G beads, washed and separated by SDS-PAGE. Separated proteins were transferred to membrane by standard Western blotting and proteins detected with a primary rabbit polyclonal antibody against an intracellular domain of Her2 (amino acids 975-1025; Bethyl #A300-621A) and a IRDye labeled donkey anti-rabbit secondary (LI_COR #926-32223) and visualized using a LI-COR infrared fluorescence labeling and detection system. The secondary antibody we used was 3×1:5000 IRDye 680 Donkey anti-rabbit IgG(H+L) (LI-COR #926-32223, lot B70215-O₂). The results are presented in FIG. 60.

[0326] Alternatively, we solubilized Ramos, JIMT-1 and MDA-MB-361 ATCC cells with Nonidet P-40 lysis buffer (a gentler detergent than those in RIPA buffer), and immunoprecipitated HER2 from 2 mg of the lysate using 5 μg Human IgG as negative control, 5 μg SMIPs (Her116, Her156, and Her 169), and 2 μg mouse monoclonal 3B5 as positive control, respectively. We ran the immunoprecipitates on polyacrylamide gels and performed Western blotting experiment. The primary antibody we used was 3×1:200 Rabbit polyclonal to ErbB2 C-term (abcam #ab2428-1, lot 212287). The secondary antibody we used was 3×1:5000 IRDye 800CW Donkey anti-Rabbit IgG(H+L) (LI-COR #926-32213, lot B70416-01). The results are presented in FIG. 61.

[0327] We found that HER156 and HER169 are capable of binding full-length HER2. It was unclear to us whether HER156 and HER169 could bind Her2 p95 (“Stumpy;” cleaved ErbB2 that should run at 95 KDa). For example, it was not clear to us whether p95 can be immunoprecipitated at detectable levels from SKBGR3 cells by either HER156 or HER169. It was possible that there was too little p95 in SKBR3 cells for detection. We also observed that the immunoprecipitation pattern of HER116, which binds to L1/CR1 domains of Her2 not present on p95, looked the same as for 3B5, which binds intracellular domain of Her2 found on full length Her2 and p95 “stumpy.” This was possibly due to sample degradation observed post immunoprecipitation.

[0328] The specification is most thoroughly understood in light of the teachings of the references cited within the specification. The embodiments within the specification provide an illustration of embodiments of the invention and should not be construed to limit the scope of the invention. The skilled artisan readily recognizes that many other embodiments are encompassed by the invention. All publications and patents cited in this disclosure are incorporated by reference in their entirety. To the extent the material incorporated by reference contradicts or is inconsistent with this specification, the specification will supercede any such material. The citation of any references herein is not an admission that such references are prior art to the present invention.

[0329] Unless otherwise indicated, all numbers expressing quantities of ingredients, reaction conditions, and so forth used in the application, are to be understood as being modified in all instances by the term “about.” Accordingly, unless otherwise indicated to the contrary, the numerical parameters are approximations and may vary depending upon the desired properties sought to be obtained by the present invention. At the very least, and not as an attempt to limit the application of the doctrine of equivalents, each numerical parameter should be construed in light of the number of significant digits and ordinary rounding approaches.

[0330] Unless otherwise indicated, the term “at least” preceding a series of elements is to be understood to refer to every element in the series. Those skilled in the art will recognize, or be able to ascertain using no more than routine experimentation, many equivalents to the specific embodiments of the invention described herein.

SEQUENCE TABLE

Her2_S1R2A_CS_1F7
V_{H} with CDR1, CDR2 and CDR3 underlined
EVQLVQSGAEVKKPGASVKVSCKASGYTFTGYYMHWVRQAPGQGLEWMGWINPNSGGT
NYAQKFQGWVTMTRDTSISTAYMELSRLRSDDTAVYYCARDSTMAPGAFDIWGRGTLVTVSS (SEQ ID NO: 1)
V_{L} with CDR1, CDR2 and CDR3 underlined
QSVLTQPPSVSVAPGQTARMTCGGNNIESKTVHWYQQKPGQAPVLVVYNDNVRPSGIPAR
FSGSNSGNTATLTINRVEAGDEADYYCQVWDSSRDQGVFGGGTKLTVLGA (SEQ ID NO: 2)
Her2_S1R2A_CS_1D11
V_{H} with CDR1, CDR2 and CDR3 underlined
EVQLVQSGSEVRRPGSSVRVSCTASGDTSSSFTVNWLRQAPGQGLEWMGGITPMFGTAN
YAQMFEDRVTITADEMELSGLTSEDTAVYFCATGPSDYVWGSYRFLDTWGRGTTVTVSS (SEQ ID NO: 3)
V_{L} with CDR1, CDR2 and CDR3 underlined
QAVLTQPSSVSAAPGQEVSISCSGARSNVGGNYVSWYQHLPGTAPKLLIYDNNKRPSGMP
DRFSGSKSGTSATLGITGVQTEDEADYYCATWDSSLSAVVFGGGTKLTVLGA (SEQ ID NO: 4)
Her2_S1R2C_CS_1D3
V_{H} with CDR1, CDR2 and CDR3 underlined
QVQLVQSGSEVRRPGSSVRISCTASGDTSSSFTVNWVRQAPGQGLEWMGGITPMFGTAN
YAQVFEDRVTIIADEMELSGLTSEDTAVYFCATGPSDYVWGSYRFLDRWGRGTLVTVSS (SEQ ID NO: 5)
V_{L} with CDR1, CDR2 and CDR3 underlined
QSVLTQPPSVSAAPGQKVTISCSGGRSSIGNNYVSWYQHLPGTAPKLLIYDNNQRPSGIPD
RFSGSKSGTSATLGITGLQTGDEADYYCGTWDSSLSAVVFGGGTKVTVLGA (SEQ ID NO: 6)
Her2_S1R2C_CS_1H12
V_{H} with CDR1, CDR2 and CDR3 underlined
EVQLVETGGGLVQPGGSLRLSCAASGFTFSSYGMNWVRQAPGKGLEWVSYISSSGNTIFY
ADSVKGRFTISRDSAKNSVSLQMNSLRDEDTAVYYCASYYSYYYGMDAWGQGTMVTV (SEQ ID NO: 7)
V_{L} with CDR1, CDR2 and CDR3 underlined
SYVLTQPPSASGTPGQRVTISCSGSSSNIGSNTVNWYQQLPGTAPKLLIYSNNQRPSGVPD
RFSGSKSGTSASLAISGLRSEDEADYYCAAWDYSLSGWVFGGGTKVTVLGA (SEQ ID NO: 8)
Her2_S1R2A_CS_1D3
V_{H} with CDR1, CDR2 and CDR3 underlined
EVQLVQSGAEVKKPGASVKVSCKASGYSFTAFYIHWVRQAPGQGLEYLGWIDPNTGATKY
AQRFQGRVIMTWDTSITTATMELSRLTSDDSAVYYCVRDLREWGYELSVEYWGRGTLVTVSS (SEQ ID NO: 9)
V_{L} with CDR1, CDR2 and CDR3 underlined
QSVLTQPPSASGTPGQRVTISCSGSSSNIGSNYVYWYQQLPGTAPKLLIYRNNQRPSGVPD
RFSGSKSGTSASLAISGLRSEDEADYYCAAWDDSLSGWVFGGGTKLTVLGA (SEQ ID NO: 10)
Her2_S1R3B2_BMV_1E1
V_{H} with CDR1, CDR2 and CDR3 underlined
EVQLVETGGGVVQPGGSLSLSCAASGFTFSSYGMQWVRQAPGKGLEWVAFIRYDGSSEY
YADSVKGRFTISRDNSKNTLYLQMNSLRAEDTAVYYCGRTLESSLWGKGTLVTVSS (SEQ ID NO: 11)
V_{L} with CDR1, CDR2 and CDR3 underlined
QSVLTQPPSVSAAPGQKVTISCSGSTSNIGNNYVSWYQQHPGKAPKLMIYDVSKRPSGVP
DRFSGSKSGNSASLDISGLQSEDEADYYCAAWDDSLSEFLFGTRTKLTVLGA (SEQ ID NO: 12)
Her2_S1R3C1_CS_1D3
V_{H} with CDR1, CDR2 and CDR3 underlined
QVQLQESGPGLVKPSQTLSLTCGISGDSVSSNSAAWNWIRQSPTRGLEWLGRTYYRSSW
YHNYAPSMNSRLTIIADTSKNQFSLQLNSVTPEDTAVYYCASGWAFDVWGRGTLVTVSS (SEQ ID NO: 13)
V_{L} with CDR1, CDR2 and CDR3 underlined
QSVLTQPPSASGSPGQSVTISCTGTSSDVGAYDFVSWYQQHPGKAPKLMIYEVNKRPSGV
PDRFSGSKSGNTASLTVSGLQAEDEADYYCSSYAGSKNLLFGGGTKLTVLGA (SEQ ID NO: 14)
Her2_S1R3B2_DP47_1E8
V_{H} with CDR1, CDR2 and CDR3 underlined
EVQLLESGGGLVQPGGSLRLSCAASGFTFSSYAMSWVRQAPGKGLEWVSAISGSGGSTY
YADSVKGRFTISRDNSKNTLYLQMNSLRAEDTAVYYCARQSGADWYFDLWGRGTLVTVSS (SEQ ID NO: 15)
V_{L} with CDR1, CDR2 and CDR3 underlined
QAVLTQPSAVSGAPGQRVTISCTGTSSNIGTNYLVHWYQQRPGTAPQLLVSGNNTRPSGV
TDRFSVSKSATSASLAITGLQAEDEADYYCQTYDINLRVWVFGGGTKVTVLGA (SEQ ID NO: 16)
Her2_S1R3B2_BMV_1G2
V_{H} with CDR1, CDR2 and CDR3 underlined
QVQLVQSGAEVKKPGSSVKVSCKASGYTFTSYGISWVRQAPGQGLEWMGWISAYNGNTN
YAQKLQGRVTMTTDTSTSTAYMELRSLRSDDTAVYYCARVPGVSGSYPDYYYMDVWGKGTLVTVSS (SEQ ID NO: 17)
V_{L} with CDR1, CDR2 and CDR3 underlined
DIQMTQSPSTLSASIGDRVTITCRASEGIYHWLAWYQQKPGKAPKLLIYKASSLASGAPSRF
SGSGSGTDFTLTISSLQPDDFATYYCQQYSNYPLTFGGGTKLEIKRA (SEQ ID NO: 18)
Her2_S1R3B2_BMV_1H5
V_{H} with CDR1, CDR2 and CDR3 underlined
EVQLVQSGGGLVRPGGSLRLSCAASGFSFSDYYMTWIRQIPGKGLEWVAVIWNDGSDRYY
ADSVKGRFTISRDNSKNTLFLQMSSLRDEDTALYYCVRGGPTASSGFDYWGRGTLVTVSS (SEQ ID NO: 19)
V_{L} with CDR1, CDR2 and CDR3 underlined
SSELTQPASVSGSPGQSITISCTGTSSDVGGYNYVSWYLQHPGKAPKLMIYEGSKRPSGVS
NRFSGSKSGNTASLTISGLQAEDEADYYCSSYTTRSTRVFGGGTKLTVLGA (SEQ ID NO: 20)
Her2_S1R3C1_CS_1A6
V_{H} with CDR1, CDR2 and CDR3 underlined
EVQLVQSGAEVKKPGESLKISCKGFGYNFRSAWIGWVRQMPGKGLEWMGVIYPGDSDVR
YSPSFQGQVTISADKSISTAYLQWSSLKASDTAMYYCTRPVGQWVDSDYWGKGTLVTVSS (SEQ ID NO: 21)
V_{L} with CDR1, CDR2 and CDR3 underlined
QSVLTQPPSASGTPGQRVTISCSGSSSNIGTNTVNWYQQLPGTAPKLLIYTSNQRPSGVPA
RFSASNSGTSASLAISGLRSEDEADYYCAAWDDKLSGAVFGGGTKLTVLGA (SEQ ID NO: 22)
Her2_S1R3B2_DP47_1C9
V_{H} with CDR1, CDR2 and CDR3 underlined
EVQLLESGGGLVQPGGSLRLSCAASGFTFSSYAMSWVRQAPGKGLEWVSAISGSGGSTY
YADSVKGRFTISRDNSKNTLYLQMNSLRAEDTAVYYCARWRPLLDYHFDQWGQGTMVTVSS (SEQ ID NO: 23)
V_{L} with CDR1, CDR2 and CDR3 underlined
QSVLTQPPSASGTPGQTVTISCSGSSSNIGSSVVNWYQQF0PGTAPKVLVYSNTQRPSGVP
DRFSGSRSGTSASLAISGLQSEDEADYYCLAWDASLNGWVFGGGTKLTVLGA (SEQ ID NO: 24)
Her2_S1R3B2_DP47_1E10
V_{H} with CDR1, CDR2 and CDR3 underlined
EVQLLESGGGLVQPGGSLRLSCAASGFTFSSYAMSWVRQAPGKGLEWVSAISGSGGSTY
YADSVKGRFTISRDNSKNTLYLQMNSLRAEDTAVYYCARGYSGYDDPDSWGRGTTVTVSS (SEQ ID NO: 25)
V_{L} with CDR1, CDR2 and CDR3 underlined
HVILTQPPSTSGTPGQTVTISCSGSSSNIGSHYVYWYQQLPGTAPKLLIYRNNQRPSGVPD
RFSGSKSGTSASLAISGLRSEDETDYYCAAWDDSLSGRVFGTGTKLTVLGA (SEQ ID NO: 26)
Her2_S1R3C1_CS_1B10
V_{H} with CDR1, CDR2 and CDR3 underlined
QVQLQQSGAEVKKPGSSVKVSCKASGGTISNYAISWVRLAPGQGLEWMGSIVPLHGTTNF
AQKFQGRVTITADESTSTSYMEVNVLTYEDTAMYYCASLNWGYWGRGTLVTVSS (SEQ ID NO: 27)
V_{L} with CDR1, CDR2 and CDR3 underlined
NFMLTQPHSVSESPGKTVTISCTGSSGSIASNYVQWYQQRPDSAPTTVIYEDNRRSSGVPD
RFSGSIDSNSASLSISGLKTEDEADYYCQSYDSSGHVVFGGGTKLTVLGA (SEQ ID NO: 28)
Her2_S1R3A1_BMV_1F3
V_{H} with CDR1, CDR2 and CDR3 underlined
EVQLVESGEGLVKPGGSLRLSCTASGFTFRSYSLNWVRQAPGQGLEWVSSISSTSTYIYYA
DSVKGRFTISRDDAKNTLYLQMNSLRAEDTAAYYCVRLGSGGGYFPDYWGRGTLVTVSS (SEQ ID NO: 29)
V_{L} with CDR1, CDR2 and CDR3 underlined
SSELTQDPAVSVALGQTVRITCQGDSLRSYYASWYQQKPGQAPVLVIYGKNNRPSGIPDRF
SGSSSGNTASLTITGAQAEDEADYYCNSRDSSGNHVVFGGGTKLTVLGA (SEQ ID NO: 30)
Her2_S1R3B1_BMV_1G11
V_{H} with CDR1, CDR2 and CDR3 underlined
QVQLVQSGGGLVQPGGSLRLSCAASGFTFSTYAMSWARQAPGKGLEWVSSISGDGGRIL
DADSAKGRFTISRDNSKNTLYLQMNGLRVEDTALYYCARADGNYWGRGTMVTVSS (SEQ ID NO: 31)
V_{L} with CDR1, CDR2 and CDR3 underlined
QSVLTQPASVSGSPGQSITISCTGTSSDVGGYNYVSWYQQHPGKAPKLMIYEGSKRPSGV
SNRFSGSKSGNTASLTISGLQAEDEADYYCSSYTTRSTRVFGGGTKLTVLGA (SEQ ID NO: 32)
Her2_S1R3A1_BMV_1G4
V_{H} with CDR1, CDR2 and CDR3 underlined
QVQLVESGAEVKKPGASVKVSCKASGYTFTSYDINWVRQAPGQRLEWMGWINAGNGNTK
YSQKFQGRVTITRDTSASTAYMELRSLRSDDTAVYYCARGRSYGHPYYFDYWGQGTLVTVSS (SEQ ID NO: 33)
V_{L} with CDR1, CDR2 and CDR3 underlined
QSVLTQPASVSGSPGQSITISCTGTSSDVGGYNYVSWYQQHPGKAPKLMIYEGSKRPSGV
SNRFSGSKSGNTASLTISGLQAEDEADYYCSSYTTRSTRVFGGGTKLTVLGA (SEQ ID NO: 34)
Her2_S1R3B1_BMV_1H11
V_{H} with CDR1, CDR2 and CDR3 underlined
EVQLVQSGGGLVKPGGSLRLSCAASGFTFSSYGMHWVRQAPGKGLEWVAGIFYDGGNKY
YADSVKGRFTISRDNSKNTLYLQMNSLRAEDTAVYYCARDRGYYYMDVWGKGTTVTVSS (SEQ ID NO: 35)
V_{L} with CDR1, CDR2 and CDR3 underlined
QSVLTQPPSVSGAPGQRVTISCTGRSSNIGAGHDVHWYQQLPGTAPKLLIYGDSNRPSGV
PDRFSGSRSGTSASLAITGLQAEDEADYYCQSYDSSLRGSVFGGGTKVTVLGA (SEQ ID NO: 36)
Her2_S1R3A1_CS_1B9
V_{H} with CDR1, CDR2 and CDR3 underlined
KVQLVQSGTEVKKPGESLKISCQGSGYRFSSDWIAWVRQMPGKGLEWMGIVYPGDSDTR
YSPSFQGQVTISADKSISTAYLQWSGLKASDTAKYYCARVQQAVGAKGYAMDVWGKGTLVTVSS (SEQ ID NO: 37)
V_{L} with CDR1, CDR2 and CDR3 underlined
QTVVIQEPSFSVSPGGTVTLTCGLSSGSVSTSYYPSWYRQTPGQAPHTLIHNTKIRSSGVP
DRFSGSILGNNAALTITGAQADDESDYYCLLYMGSGIYVFGGGTKLTVLGA (SEQ ID NO: 38)
Her2_S1R3B1_BMV_1H9
V_{H} with CDR1, CDR2 and CDR3 underlined
QVQLQESGAGLVKPSGTLSLTCAVSGGSISSGNWWSWVRQPPGKGLEWIGEISHSGSTN
YNPSLKSRVTISVDKSKNQFSLNLSSVTAADTAVYYCARVRGTVGDTRGPDYWGQGTLVTVSS (SEQ ID NO: 39)
V_{L} with CDR1, CDR2 and CDR3 underlined
SSELTQDPAVSVALGQTVRITCQGDSLRSYYASWYQQKPGQAPVLVIYGKNNRPSGIPDRF
SGSSSGNTASLTITGAQAEDEADYYCNSRDSSGNHVVFGGGTKLTVLGA (SEQ ID NO: 40)
Her2_S1R3A1_CS_1B10
V_{H} with CDR1, CDR2 and CDR3 underlined
EVQLVQSGAEVKKPGASVRVSCKGSGNTFTGHYIHWVRQAPGQGLEWLGWIDPNTGDIQ
YSENFKGSVTLTRDPSINSVFMDLIRLTSDDTAMYYCAREGAGLANYYYYGLDVWGRGTMVTVSS (SEQ ID NO: 41)
V_{L} with CDR1, CDR2 and CDR3 underlined
QTVVLQEPSFSVSPGGTVTLTCGLNFGSVSTAYYPSWYQQTPGQAPRTLIYGTNIRSSGVP
DRFSGSIVGNKAALTITGAQTEDESDYYCALYMGSGMLFGGGTKVTVLGA (SEQ ID NO: 42)
Her2_S1R3B1_BMV_1C12
V_{H} with CDR1, CDR2 and CDR3 underlined
EVQLVQSGGGVVQPGRSLRLSCAASGFTFSSYGMHWVRQAPGKGLEWVAVISYDGSIKY
YADSVKGRFTISRDNSKNTLYLQMNSLRAEDTAVYYCARTGEYSGYDTSGYSNWGQGTLVTVSS (SEQ ID NO: 43)
V_{L} with CDR1, CDR2 and CDR3 underlined
QSVLTQPPSASGTPGQRVTISCSGSSSNIGSNTVNWYQRLPGAAPQLLIYNNDQRPSGIPD
RFSGSKSGTSGSLVISGLQSEDEADYYCASWDDSLNGRVFGGGTKLTVLG (SEQ ID NO: 44)
Her2_S1R3C1_BMV_1H11
V_{H} with CDR1, CDR2 and CDR3 underlined
GVQLVESGGGLVKPGGSLRLSCAASGFTFSSYNMNWVRQAPGKGLEWVSAISGSGGSTY
YADSVTGRFTISRDNSKNTLYLQMNSLRAEDTAVYYCAKDTSGWYGDGMDVWGRGTLVTVSS (SEQ ID NO: 45)
V_{L} with CDR1, CDR2 and CDR3 underlined
DIQMTQSPSTLSASIGDRVTITCRASEGIYHWLAWYQQKPGKAPKLLIYKASSLASGAPSRF
SGSGSGTDFTLTISSLQPDDFATYYCQQYSNYPLTFGGGTKLEIKRA (SEQ ID NO: 46)
Her2_S1R3B1_BMV_1A10
V_{H} with CDR1, CDR2 and CDR3 underlined
QMQLVQSGGGVVQPGRSLRLSCAASGFTFSSYGMHWVRQAPGKGLEWVAVISYDGSIKY
YADSVKGRFTISRDNSKNTLYLQMNSLRAEDTGVYYCSKDRYSSGWYSSDAFDIWGRGTMVTVSS (SEQ ID NO: 47)
V_{L} with CDR1, CDR2 and CDR3 underlined
SSELTQDPAVSVALGQTVRITCQGDSLRSYYASWYQQKPGQAPVLVIYGKNNRPSGIPDRF
SGSSSGNTASLTITGAQAEDEADYYCHSRDSSGNHVLFGGGTKLTVLGA (SEQ ID NO: 48)
Her2_S1R3A1_CS_1D11
V_{H} with CDR1, CDR2 and CDR3 underlined
EVQLVQSGAEVKKPGESLKISCKGSGYTFTNHWIAWVRQMPGKGLEWMGIIYPGDSETRY
SPSFQGHVTISADKSISTAYLQWSTLKDSDSAMYFCVRQARGWDDGRAGYYYSGMDAWGQGTLVTVSS (SEQ ID NO: 49)
V_{L} with CDR1, CDR2 and CDR3 underlined
QAVVLQEPSFSVSPGGTVTLTCGLRSGSVSTSHYPSWYQQTPGQAPRTLIYSTNTRSSGV
PDRFSGSILGNKAALTITGAQADDESNYYCMLYMGSGMYVFGGGTKVTVLGA (SEQ ID NO: 50)
Her2_S1R3C1_DP47_1H1
V_{H} with CDR1, CDR2 and CDR3 underlined
EVQLLESGGGLVQPGGSLRLSCAASGFTFSSYAMSWVRQAPGKGLEWVSAISGSGGSTY
YADSVKGRFTISRDNSKNTLYLQMNSLRAEDTAVYYCARVSGSHFPFFDSWGQGTMVTVSS (SEQ ID NO: 51)
V_{L} with CDR1, CDR2 and CDR3 underlined
QSVLTQPPSVSVAPGQTARITCGGDKIGHKSVHWYQQKPGQAPVLLVYDDRKRPSGIPER
FSGSNSGNTATLTISRVEAGDEAAYHCQVWDRSSDPYVFGTGTKVTVLGA (SEQ ID NO: 52)
Her2_S1R3A1_CS_1B12
V_{H} with CDR1, CDR2 and CDR3 underlined
QVQLVQSGAEVKKPGASVKVSCQASGYTFSGHYMHLVRQAPGQGLEWMGWIHPTSGGT
TYAQKFQGRVVMTRDTSISTAYMELSRLTSDDTAVYYCARMSQNYDAFDIWGQGTMVTVSS (SEQ ID NO: 53)
V_{L} with CDR1, CDR2 and CDR3 underlined
QAVLTQPSSVSGAPGQRVTISCTGSSSNIGAGYDVNWYQQFPGTAPKIIVYGDRPSGAPDR
FSGSKSGTSASLAITGLRAEDEADYYCQSWDSRLSSYVFGTGTKVTVLGA (SEQ ID NO: 54)
Her2_S1R3B1_BMV_1H5
V_{H} with CDR1, CDR2 and CDR3 underlined
QVQLQESGGGVVQPGGSLRLSCAASGFTFSGYGMHWVRQAPGKGLEWVASVRNDGSNT
YYTDSVKDRFTISRDNTKNTLYLQMNSLRAEDTAVYYCAKSRRVMYGTSYYFDYWGRGTLVTVSS (SEQ ID NO: 55)
V_{L} with CDR1, CDR2 and CDR3 underlined
SSELTQDPAVSVALGQTVRITCQGDSLRSYYASWYQQKPGQAPVLVIYGKNNRPSGIPDRF
SGSSSGNTASLTITGAQAEDEADYYCNSRDSSGNHVVFGGGTKLTVLGA (SEQ ID NO: 56)
Her2_S1R3A1_DP47_1A6
V_{H} with CDR1, CDR2 and CDR3 underlined
EVQLLESGGGLVQPGGSLRLSCAASGFTFSSYAMSWVRQAPGKGLEWVSAISGSGGSTY
YADSVKGRFTISRDNSKNTLYLQMNSLRAEDTAVYYCARDLGIDPLWSGYYTPLDYWGRGTMVTVSS (SEQ ID NO: 57)
V_{L} with CDR1, CDR2 and CDR3 underlined
HVILTQPPSASGTPGQRVTISCSGSSSNIGSNSVSWYQQLPGTAPKLLMYTNNQRPSGVPD
RFSGSKSGTSASLAISGLQSEDEADYYCATWDASLNTWVFGGGTKVTVLGA (SEQ ID NO: 58)
Her2_S1R3B1_DP47_1E1
V_{H} with CDR1, CDR2 and CDR3 underlined
EVQLLESGGGLVQPGGSLRLSCAASGFTFSSYAMSWVRQAPGKGLEWVSAISGSGGSTY
YADSVKGRFTISRDNSKNTLYLQMNSLRAEDTAVYYCARGGSGSDYWGQGTMVTVSS (SEQ ID NO: 59)
V_{L} with CDR1, CDR2 and CDR3 underlined
NFMLTQPHSVSGSPGKTVTISCTRSSGYIDSKYVQWYQQRPGSAPTTVIYEDNRRPSGVP
DRFSGSIDSNSASLTISGLETEDEADYYCQSYDDTNVVFGGGTKVTVLGA (SEQ ID NO: 60)
Her2_S1R3B1_BMV_1A1
V_{H} with CDR1, CDR2 and CDR3 underlined
EVQLVQSGAEVKEPGASVKVSCKASGYDFSNYGFSWVRQAPGQGLEWMGWISSYNGYT
NYAQRLQGRVTMTTDTSTSTAYMELRSLRSDDTAVYYCARDRGLGNWYFDLWGQGTLVTVSS (SEQ ID NO: 61)
V_{L} with CDR1, CDR2 and CDR3 underlined
QSVLTQPASVSGSPGQSITISCTGTSSDVGGYNYVSWYQQHPGKAPKLMIYEGSKRPSGV
SNRFSGSKSGNTASLTISGLQAEDEADYYCSSYTTRSTRVFGGGTKLTVLGA (SEQ ID NO: 62)
Her2_S1R2A_CS_1F7
V_{L} with CDR1, CDR2 and CDR3 underlined
QSVLTQPPSVSVAPGQTARMTCGGNNIESKTVHWYQQKPGQAPVLVVYNDNVRPSGIPAR
FSGSNSGNTATLTINRVEAGDEADYYCQVWDSSRDQGVFGGGTKLTVL (SEQ ID NO: 63)
Her2_S1R2A_CS_1D11
V_{L} with CDR1, CDR2 and CDR3 underlined
QAVLTQPSSVSAAPGQEVSISCSGARSNVGGNYVSWYQHLPGTAPKLLIYDNNKRPSGMP
DRFSGSKSGTSATLGITGVQTEDEADYYCATWDSSLSAVVFGGGTKLTVL (SEQ ID NO: 64)
Her2_S1R2C_CS_1D3
V_{H} with CDR1, CDR2 and CDR3 underlined
QVQLVQSGSEVRRPGSSVRISCTASGDTSSSFTVNWVRQAPGQGLEWMGGITPMFGTAN
YAQVFEDRVTIIADEMELSGLTSEDTAVYFCATGPSDYVWGSYRFLDNWGRGTLVTVSS (SEQ ID NO: 65)
Her2_S1R2C_CS_1D3
V_{L} with CDR1, CDR2 and CDR3 underlined
QSVLTQPPSVSAAPGQKVTISCSGGRSSIGNNYVSWYQHLPGTAPKLLIYDNNQRPSGIPD
RFSGSKSGTSATLGITGLQTGDEADYYCGTWDSSLSAVVFGGGTKVTVL (SEQ ID NO: 66)
Her2_S1R2C_CS_1H12
V_{H} with CDR1, CDR2 and CDR3 underlined
EVQLVETGGGLVQPGGSLRLSCAASGFTFSSYGMNWVRQAPGKGLEWVSYISSSGNTIFY
ADSVKGRFTISRDSAKNSVSLQMNSLRDEDTAVYYCASYYSYYYGMDAWGQGTMVTVSS (SEQ ID NO: 67)
Her2_S1R2C_CS_1H12
V_{L} with CDR1, CDR2 and CDR3 underlined
SYVLTQPPSASGTPGQRVTISCSGSSSNIGSNTVNWYQQLPGTAPKLLIYSNNQRPSGVPD
RFSGSKSGTSASLAISGLRSEDEADYYCAAWDYSLSGWVFGGGTKVTVL (SEQ ID NO: 68)
Her2_S1R2A_CS_1D3
V_{L} with CDR1, CDR2 and CDR3 underlined
QSVLTQPPSASGTPGQRVTISCSGSSSNIGSNYVYWYQQLPGTAPKLLIYRNNQRPSGVPD
RFSGSKSGTSASLAISGLRSEDEADYYCAAWDDSLSGWVFGGGTKLTVL (SEQ ID NO: 69)
Her2_S1R3B2_BMV_1E1
V_{L} with CDR1, CDR2 and CDR3 underlined
QSVLTQPPSVSAAPGQKVTISCSGSTSNIGNNYVSWYQQHPGKAPKLMIYDVSKRPSGVP
DRFSGSKSGNSASLDISGLQSEDEADYYCAAWDDSLSEFLFGTRTKLTVL (SEQ ID NO: 70)
Her2_S1R3C1_CS_1D3
V_{L} with CDR1, CDR2 and CDR3 underlined
QSVLTQPPSASGSPGQSVTISCTGTSSDVGAYDFVSWYQQHPGKAPKLMIYEVNKRPSGV
PDRFSGSKSGNTASLTVSGLQAEDEADYYCSSYAGSKNLLFGGGTKLTVL (SEQ ID NO: 71)
Her2_S1R3B2_DP47_1E8
V_{L} with CDR1, CDR2 and CDR3 underlined
QAVLTQPSAVSGAPGQRVTISCTGTSSNIGTNYLVHWYQQRPGTAPQLLVSGNNTRPSGV
TDRFSVSKSATSASLAITGLQAEDEADYYCQTYDINLRVWVFGGGTKVTVL (SEQ ID NO: 72)
Her2_S1R3B2_BMV_1G2
V_{L} with CDR1, CDR2 and CDR3 underlined
DIQMTQSPSTLSASIGDRVTITCRASEGIYHWLAWYQQKPGKAPKLLIYKASSLASGAPSRF
SGSGSGTDFTLTISSLQPDDFATYYCQQYSNYPLTFGGGTKLEIK (SEQ ID NO: 73)
Her2_S1R3B2_BMV_1H5
V_{L} with CDR1, CDR2 and CDR3 underlined
SSELTQPASVSGSPGQSITISCTGTSSDVGGYNYVSWYLQHPGKAPKLMIYEGSKRPSGVS
NRFSGSKSGNTASLTISGLQAEDEADYYCSSYTTRSTRVFGGGTKLTVL (SEQ ID NO: 74)
Her2_S1R3C1_CS_1A6
V_{L} with CDR1, CDR2 and CDR3 underlined
QSVLTQPPSASGTPGQRVTISCSGSSSNIGTNTVNWYQQLPGTAPKLLIYTSNQRPSGVPA
RFSASNSGTSASLAISGLRSEDEADYYCAAWDDKLSGAVFGGGTKLTVL (SEQ ID NO: 75)
Her2_S1R3B2_DP47_1C9
V_{L} with CDR1, CDR2 and CDR3 underlined
QSVLTQPPSASGTPGQTVTISCSGSSSNIGSSVVNWYQQFPGTAPKVLVYSNTQRPSGVP
DRFSGSRSGTSASLAISGLQSEDEADYYCLAWDASLNGWVFGGGTKLTVL (SEQ ID NO: 76)
Her2_S1R3B2_DP47_1E10
V_{L} with CDR1, CDR2 and CDR3 underlined
HVILTQPPSTSGTPGQTVTISCSGSSSNIGSHYVYWYQQLPGTAPKLLIYRNNQRPSGVPD
RFSGSKSGTSASLAISGLRSEDETDYYCAAWDDSLSGRVFGTGTKLTVL (SEQ ID NO: 77)
Her2_S1R3C1_CS_1B10
V_{L} with CDR1, CDR2 and CDR3 underlined
NFMLTQPHSVSESPGKTVTISCTGSSGSIASNYVQWYQQRPDSAPTTVIYEDNRRSSGVPD
RFSGSIDSNSASLSISGLKTEDEADYYCQSYDSSGHVVFGGGTKLTVL (SEQ ID NO: 78)
Her2_S1R3A1_BMV_1F3
V_{L} with CDR1, CDR2 and CDR3 underlined
SSELTQDPAVSVALGQTVRITCQGDSLRSYYASWYQQKPGQAPVLVIYGKNNRPSGIPDRF
SGSSSGNTASLTITGAQAEDEADYYCNSRDSSGNHVVFGGGTKLTVL (SEQ ID NO: 79)
Her2_S1R3B1_BMV_1G11
V_{L} with CDR1, CDR2 and CDR3 underlined
QSVLTQPASVSGSPGQSITISCTGTSSDVGGYNYVSWYQQHPGKAPKLMIYEGSKRPSGV
SNRFSGSKSGNTASLTISGLQAEDEADYYCSSYTTRSTRVFGGGTKLTVL (SEQ ID NO: 80)
Her2_S1R3A1_BMV_1G4
V_{L} with CDR1, CDR2 and CDR3 underlined
QSVLTQPASVSGSPGQSITISCTGTSSDVGGYNYVSWYQQHPGKAPKLMIYEGSKRPSGV
SNRFSGSKSGNTASLTISGLQAEDEADYYCSSYTTRSTRVFGGGTKLTVL (SEQ ID NO: 81)
Her2_S1R3B1_BMV_1H11
V_{L} with CDR1, CDR2 and CDR3 underlined
QSVLTQPPSVSGAPGQRVTISCTGRSSNIGAGHDVHWYQQLPGTAPKLLIYGDSNRPSGV
PDRFSGSRSGTSASLAITGLQAEDEADYYCQSYDSSLRGSVFGGGTKVTVL (SEQ ID NO: 82)
Her2_S1R3A1_CS_1B9
V_{L} with CDR1, CDR2 and CDR3 underlined
QTVVIQEPSFSVSPGGTVTLTCGLSSGSVSTSYYPSWYRQTPGQAPHTLIHNTKIRSSGVP
DRFSGSILGNNAALTITGAQADDESDYYCLLYMGSGIYVFGGGTKLTVL (SEQ ID NO: 83)
Her2_S1R3B1_BMV_1H9
V_{L} with CDR1, CDR2 and CDR3 underlined
SSELTQDPAVSVALGQTVRITCQGDSLRSYYASWYQQKPGQAPVLVIYGKNNRPSGIPDRF
SGSSSGNTASLTITGAQAEDEADYYCNSRDSSGNHVVFGGGTKLTVL (SEQ ID NO: 84)
Her2_S1R3A1_CS_1B10
V_{L} with CDR1, CDR2 and CDR3 underlined
QTVVLQEPSFSVSPGGTVTLTCGLNFGSVSTAYYPSWYQQTPGQAPRTLIYGTNIRSSGVP
DRFSGSIVGNKAALTITGAQTEDESDYYCALYMGSGMLFGGGTKVTVL (SEQ ID NO: 85)
Her2_S1R3B1_BMV_1C12
V_{L} with CDR1, CDR2 and CDR3 underlined
QSVLTQPPSASGTPGQRVTISCSGSSSNIGSNTVNWYQRLPGAAPQLLIYNNDQRPSGIPD
RFSGSKSGTSGSLVISGLQSEDEADYYCASWDDSLNGRVFGGGTKLTVL (SEQ ID NO: 86)
Her2_S1R3C1_BMV_1H11
V_{L} with CDR1, CDR2 and CDR3 underlined
DIQMTQSPSTLSASIGDRVTITCRASEGIYHWLAWYQQKPGKAPKLLIYKASSLASGAPSRF
SGSGSGTDFTLTISSLQPDDFATYYCQQYSNYPLTFGGGTKLEIK (SEQ ID NO: 87
Her2_S1R3B1_BMV_1A10
V_{L} with CDR1, CDR2 and CDR3 underlined
SSELTQDPAVSVALGQTVRITCQGDSLRSYYASWYQQKPGQAPVLVIYGKNNRPSGIPDRF
SGSSSGNTASLTITGAQAEDEADYYCHSRDSSGNHVLFGGGTKLTVL (SEQ ID NO: 88)
Her2_S1R3A1_CS_1D11
V_{L} with CDR1, CDR2 and CDR3 underlined
QAVVLQEPSFSVSPGGTVTLTCGLRSGSVSTSHYPSWYQQTPGQAPRTLIYSTNTRSSGV
PDRFSGSILGNKAALTITGAQADDESNYYCMLYMGSGMYVFGGGTKVTVL (SEQ ID NO: 89)
Her2_S1R3C1_DP47_1H1
V_{L} with CDR1, CDR2 and CDR3 underlined
QSVLTQPPSVSVAPGQTARITCGGDKIGHKSVHWYQQKPGQAPVLLVYDDRKRPSGIPER
FSGSNSGNTATLTISRVEAGDEAAYHCQVWDRSSDPYVFGTGTKVTVL (SEQ ID NO: 90)
Her2_S1R3A1_CS_1B12
V_{L} with CDR1, CDR2 and CDR3 underlined
QAVLTQPSSVSGAPGQRVTISCTGSSSNIGAGYDVNWYQQFPGTAPKIIVYGDRPSGAPDR
FSGSKSGTSASLAITGLRAEDEADYYCQSWDSRLSSYVFGTGTKVTVL (SEQ ID NO: 91)
Her2_S1R3B1_BMV_1H5
V_{L} with CDR1, CDR2 and CDR3 underlined
SSELTQDPAVSVALGQTVRITCQGDSLRSYYASWYQQKPGQAPVLVIYGKNNRPSGIPDRF
SGSSSGNTASLTITGAQAEDEADYYCNSRDSSGNHVVFGGGTKLTVL (SEQ ID NO: 92)
Her2_S1R3A1_DP47_1A6
V_{L} with CDR1, CDR2 and CDR3 underlined
HVILTQPPSASGTPGQRVTISCSGSSSNIGSNSVSWYQQLPGTAPKLLMYTNNQRPSGVPD
RFSGSKSGTSASLAISGLQSEDEADYYCATWDASLNTWVFGGGTKVTVL (SEQ ID NO: 93)
Her2_S1R3B1_DP47_1E1
V_{L} with CDR1, CDR2 and CDR3 underlined
NFMLTQPHSVSGSPGKTVTISCTRSSGYIDSKYVQWYQQRPGSAPTTVIYEDNRRPSGVP
DRFSGSIDSNSASLTISGLETEDEADYYCQSYDDTNVVFGGGTKVTVL (SEQ ID NO: 94)
Her2_S1R3B1_BMV_1A1
V_{L} with CDR1, CDR2 and CDR3 underlined
QSVLTQPASVSGSPGQSITISCTGTSSDVGGYNYVSWYQQHPGKAPKLMIYEGSKRPSGV
SNRFSGSKSGNTASLTISGLQAEDEADYYCSSYTTRSTRVFGGGTKLTVL (SEQ ID NO 95)
Her2_S1R2A_CS_1F7
V_{H} with CDR1, CDR2 and CDR3 underlined
GAGGTCCAGCTGGTGCAGTCTGGGGCTGAGGTGAAGAAGCCTGGGGCCTCAGTGAAG
GTCTCCTGCAAGGCTTCTGGATACACCTTCACCGGCTACTATATGCACTGGGTGCGAC
AGGCCCCTGGACAAGGGCTTGAGTGGATGGGATGGATCAACCCTAACAGTGGTGGCA
CAAACTATGCACAGAAGTTTCAGGGCTGGGTCACCATGACCAGGGACACGTCCATCAG
CACAGCCTACATGGAGCTGAGCAGGCTGAGATCTGACGACACGGCCGTGTATTACTGT
GCGAGAGATTCTACTATGGCCCCAGGTGCTTTTGATATCTGGGGCCGAGGCACCCTGG
TCACCGTCTCGAGT (SEQ ID NO: 96)
Her2_S1R2A_CS_1F7
V_{L} with CDR1, CDR2 and CDR3 underlined
CAGTCTGTGCTGACTCAGCCACCCTCGGTGTCAGTGGCCCCAGGACAGACGGCCAGG
ATGACCTGTGGGGGAAACAACATTGAAAGTAAAACTGTGCATTGGTACCAGCAGAAGC
CGGGCCAGGCCCCTGTGCTGGTCGTCTACAATGATAACGTCCGGCCCTCAGGGATCC
CTGCGCGATTCTCTGGCTCCAACTCCGGCAACACGGCCACCCTGACCATCAACAGGGT
CGAAGCCGGGGATGAGGCCGACTATTATTGTCAGGTGTGGGACTCCAGTAGAGATCAA
GGGGTATTCGGCGGAGGGACCAAGCTGACCGTC (SEQ ID NO: 97)
Her2_S1R2A_CS_1D11
V_{H} with CDR1, CDR2 and CDR3 underlined
GGAGGCCTGGGTCCTCGGTGAGGGTCTCCTGCACGGCTTCTGGAGACACCTCCAGCA
GCTTTACCGTCAACTGGCTGCGACAGGCCCCTGGACAAGGTCTTGAGTGGATGGGAG
GGATCACCCCTATGTTTGGCACTGCAAACTACGCACAGATGTTCGAGGACAGAGTCAC
GATAACCGCGGACGAAATGGAACTGAGTGGCCTGACATCTGAGGACACGGCCGTGTAT
TTTTGTGCGACAGGCCCCTCCGATTACGTTTGGGGGAGTTATCGTTTCCTTGACACCTG
GGGGCGGGGGACCACGGTCACCGTCTCGAGT (SEQ ID NO: 98)
Her2_S1R2A_CS_1D11
V_{L} with CDR1, CDR2 and CDR3 underlined
CAGGCTGTGCTGACTCAGCCGTCCTCAGTGTCTGCGGCCCCAGGACAGGAGGTCTCC
ATCTCCTGCTCTGGAGCCAGATCCAACGTTGGGGGTAATTATGTTTCCTGGTACCAACA
CCTCCCAGGAACAGCCCCCAAACTCCTCATTTATGACAATAATAAGCGACCCTCAGGGA
TGCCTGACCGATTCTCTGGCTCCAAGTCTGGCACGTCAGCCACCCTGGGCATCACCGG
AGTCCAGACTGAGGACGAGGCCGATTATTACTGCGCAACATGGGATAGCAGCCTGAGC
GCTGTGGTCTTCGGCGGAGGGACCAAGCTGACCGTCCTA (SEQ ID NO: 99)
Her2_S1R2C_CS_1D3
V_{H} with CDR1, CDR2 and CDR3 underlined
CAGGTGCAGCTGGTGCAGTCTGGGTCTGAGGTGAGGAGGCCTGGGTCCTCGGTGAGG
ATCTCCTGCACGGCTTCTGGAGACACCTCCAGCAGCTTTACCGTCAACTGGGTGCGAC
AGGCCCCTGGACAAGGTCTTGAGTGGATGGGAGGGATCACCCCTATGTTTGGCACTGC
AAACTACGCACAGGTGTTCGAGGACAGAGTCACAATAATCGCGGACGAGATGGAACTG
AGTGGCCTGACATCTGAGGACACGGCCGTGTATTTCTGTGCGACAGGCCCCTCCGATT
ACGTTTGGGGGAGTTATCGTTTCCTTGACAACTGGGGCAGGGGCACCCTGGTCACCGT
CTCGAGT (SEQ ID NO: 100)
Her2_S1R2C_CS_1D3
V_{L} with CDR1, CDR2 and CDR3 underlined
CAGTCTGTGCTGACTCAGCCACCCTCAGTGTCTGCGGCCCCAGGGCAGAAGGTCACC
ATCTCCTGCTCTGGAGGCAGGTCCAGCATTGGGAATAATTATGTGTCCTGGTATCAACA
CCTCCCAGGAACAGCCCCCAAACTCCTCATCTATGACAATAATCAGCGACCCTCAGGG
ATTCCTGACCGATTCTCTGGCTCCAAGTCTGGCACGTCAGCCACCCTGGGCATCACCG
GACTCCAGACTGGGGACGAGGCCGATTATTACTGCGGAACATGGGATAGCAGCCTGA
GTGCTGTGGTGTTTGGCGGAGGGACCAAGGTCACCGTCCTA (SEQ ID NO: 101)
Her2_S1R2C_CS_1H12
V_{H} with CDR1, CDR2 and CDR3 underlined
GAGGTGCAGCTGGTGGAGACTGGGGGAGGCTTGGTACAGCCTGGGGGGTCCCTGAG
ACTCTCCTGTGCAGCCTCTGGATTCACCTTCAGTAGCTATGGCATGAACTGGGTCCGC
CAGGCTCCAGGGAAGGGGCTGGAGTGGGTTTCATACATTAGTAGTTCTGGTAATACCA
TATTCTACGCAGACTCTGTGAAGGGCCGATTCACCATCTCCAGAGACAGTGCCAAGAAT
TCAGTGTCTCTGCAGATGAACAGCCTGAGAGACGAGGACACGGCTGTGTATTACTGTG
CTTCCTACTACTCCTACTACTACGGTATGGACGCCTGGGGCCAGGGGACAATGGTCAC
CGTCTCGAGTTCGAGT (SEQ ID NO: 102)
Her2_S1R2C_CS_1H12
V_{L} with CDR1, CDR2 and CDR3 underlined
TCTGGGACCCCCGGGCAGAGGGTCACCATCTCTTGTTCTGGAAGCAGCTCCAACATCG
GAAGTAATACTGTAAACTGGTACCAGCAGCTCCCAGGAACGGCCCCCAAACTCCTCAT
CTATAGTAATAATCAGCGGCCCTCAGGGGTCCCTGACCGATTCTCTGGCTCCAAGTCT
GGCACCTCAGCCTCCCTGGCCATCAGTGGGCTGCGGTCCGAGGATGAGGCTGATTATT
ACTGTGCAGCATGGGATTACAGCCTGAGTGGTTGGGTGTTCGGCGGAGGGACCAAGG
TCACCGTCCTA (SEQ ID NO: 103)
Her2_S1R2A_CS_1D3
V_{H} with CDR1, CDR2 and CDR3 underlined
GAAGTGCAGCTGGTGCAGTCTGGGGCTGAGGTGAAGAAGCCTGGGGCCTCAGTGAAG
GTCTCCTGCAAGGCTTCTGGGTACAGCTTCACCGCCTTCTATATTCACTGGGTGCGACA
GGCCCCTGGACAAGGCCTTGAGTATTTGGGATGGATCGACCCTAATACTGGTGCCACA
AAATATGCACAGCGCTTTCAGGGCAGGGTCATCATGACCTGGGACACGTCCATCACCA
CAGCCACCATGGAACTGAGCAGGCTGACGTCTGACGACTCGGCCGTCTACTACTGTGT
GAGAGATTTGCGGGAGTGGGGCTACGAATTGTCCGTTGAGTATTGGGGCAGAGGAAC
CCTGGTCACCGTCTCGAGT (SEQ ID NO: 104)
Her2_S1R2A_CS_1D3
V_{L} with CDR1, CDR2 and CDR3 underlined
CAGTCTGTGCTGACTCAGCCACCCTCAGCGTCTGGGACCCCCGGGCAGAGGGTCACC
ATCTCTTGTTCTGGAAGCAGCTCCAACATCGGAAGTAATTATGTATACTGGTACCAGCA
GCTCCCAGGAACGGCCCCCAAACTCCTCATCTATAGGAATAATCAGCGGCCCTCAGGG
GTCCCTGACCGATTCTCTGGCTCCAAGTCTGGCACCTCAGCCTCCCTGGCCATCAGTG
GGCTCCGGTCCGAGGATGAGGCTGATTATTACTGTGCAGCATGGGATGACAGCCTGAG
TGGTTGGGTGTTCGGCGGAGGGACCAAGCTGACCGTCCTA (SEQ ID NO: 105)
Her2_S1R3B2_BMV_1E1
V_{H} with CDR1, CDR2 and CDR3 underlined
GAGGTGCAGCTGGTGGAGACTGGGGGAGGCGTGGTCCAGCCTGGGGGGTCCCTGAG
CCTCTCCTGTGCAGCGTCTGGATTCACCTTCAGTAGCTATGGCATGCAGTGGGTCCGC
CAGGCTCCAGGCAAGGGGCTGGAGTGGGTGGCGTTTATACGGTACGATGGAAGTAGT
GAATACTATGCAGACTCCGTGAAGGGCCGATTCACCATCTCCAGAGACAATTCCAAGAA
CACGCTGTATCTGCAAATGAACAGCCTGAGAGCTGAGGACACGGCTGTGTATTACTGT
GGAAGAACGCTGGAGTCTAGTTTGTGGGGCAAGGGAACCCTGGTCACCGTCTCGAGT (SEQ ID NO: 106)
Her2_S1R3B2_BMV_1E1
V_{L} with CDR1, CDR2 and CDR3 underlined
CAGTCTGTGTTGACGCAGCCGCCCTCAGTGTCTGCGGCCCCAGGACAGAAGGTCACC
ATTTCCTGCTCTGGAAGCACCTCCAACATTGGGAATAATTATGTCTCCTGGTACCAACA
GCACCCAGGCAAAGCCCCCAAACTCATGATTTATGATGTCAGTAAGCGGCCCTCAGGG
GTCCCTGACCGATTCTCTGGCTCCAAGTCTGGCAACTCAGCCTCCCTGGACATCAGTG
GGCTCCAGTCTGAGGATGAGGCTGATTATTACTGTGCAGCATGGGATGACAGCCTGAG
TGAATTTCTCTTCGGAACTAGGACCAAGCTGACCGTCCTA (SEQ ID NO: 107)
Her2_S1R3C1_CS_1D3
V_{H} with CDR1, CDR2 and CDR3 underlined
CAGGTGCAGCTGCAGGAGTCGGGTCCAGGACTGGTGAAGCCCTCGCAGACCTTGTCA
CTCACCTGTGGCATCTCCGGGGACAGTGTCTCTAGCAACAGTGCTGCTTGGAACTGGA
TCAGGCAGTCCCCAACGAGAGGCCTTGAGTGGCTGGGAAGGACATATTACAGGTCCAG
TTGGTATCATAACTATGCACCTTCTATGAACAGTCGATTAACCATCATCGCAGACACATC
CAAAAACCAGTTCTCTTTGCAACTGAACTCTGTGACTCCCGAGGACACGGCTGTATATT
ACTGTGCAAGCGGGTGGGCCTTTGATGTCTGGGGCAGGGGAACCCTGGTCACCGTCT
CGAGT (SEQ ID NO: 108)
Her2_S1R3C1_CS_1D3
V_{L} with CDR1, CDR2 and CDR3 underlined
CAGTCTGTGCTGACTCAGCCACCCTCCGCGTCCGGGTCTCCTGGACAGTCAGTCACCA
TCTCCTGCACTGGAACCAGCAGTGACGTTGGTGCTTATGACTTTGTCTCCTGGTACCAA
CAGCACCCTGGCAAAGCCCCCAAACTCATGATTTATGAGGTCAATAAGCGGCCCTCAG
GGGTCCCTGATCGCTTCTCTGGCTCCAAGTCTGGCAACACGGCCTCCCTGACCGTCTC
TGGGCTCCAGGCTGAGGATGAGGCTGATTATTACTGCAGCTCATATGCAGGCAGCAAG
AATTTGCTTTTCGGCGGAGGGACCAAGCTGACCGTCCTA (SEQ ID NO: 109)
Her2_S1R3B2_DP47_1E8
V_{H} with CDR1, CDR2 and CDR3 underlined
GAGGTGCAGCTGTTGGAGTCTGGGGGAGGCTTGGTACAGCCTGGGGGGTCCCTGAGA
CTCTCCTGTGCAGCCTCTGGATTCACCTTTAGCAGCTATGCCATGAGCTGGGTCCGCC
AGGCTCCAGGGAAGGGGCTGGAGTGGGTCTCAGCTATTAGTGGTAGTGGTGGTAGCA
CATACTACGCAGACTCCGTGAAGGGCCGGTTCACCATCTCCAGAGACAATTCCAAGAA
CACGCTGTATCTGCAAATGAACAGCCTGAGAGCCGAGGACACGGCCGTGTATTACTGT
GCGAGACAGTCGGGCGCGGACTGGTACTTCGATCTCTGGGGCCGAGGCACCCTGGTC
ACCGTCTCGAGT (SEQ ID NO: 110)
Her2_S1R3B2_DP47_1E8
V_{L} with CDR1, CDR2 and CDR3 underlined
CAGGCTGTGCTGACTCAGCCGTCCGCAGTTTCTGGGGCCCCAGGGCAGAGGGTCACC
ATCTCCTGCACTGGGACCAGCTCCAACATCGGGACAAACTATCTTGTACACTGGTATCA
GCAACGTCCAGGAACAGCCCCCCAACTCCTCGTCTCTGGTAACAACACTCGACCCTCT
GGGGTCACTGACCGGTTCTCTGTCTCCAAGTCTGCCACTTCAGCCTCCCTGGCCATCA
CTGGGCTCCAGGCTGAGGATGAGGCTGATTATTACTGCCAGACCTATGACATCAACTT
GAGGGTTTGGGTGTTCGGCGGAGGGACCAAGGTCACCGTCCTA (SEQ ID NO: 111)
Her2_S1R3B2_BMV_1G2
V_{H} with CDR1, CDR2 and CDR3 underlined
CAGGTGCAGCTGGTGCAGTCTGGAGCTGAGGTGAAGAAGCCTGGGTCCTCGGTGAAG
GTCTCCTGCAAGGCTTCTGGTTACACCTTTACCAGCTATGGTATCAGCTGGGTGCGACA
GGCCCCTGGACAAGGGCTTGAGTGGATGGGATGGATCAGCGCTTACAATGGTAACACA
AACTATGCACAGAAGCTCCAGGGCAGAGTCACCATGACCACAGACACATCCACGAGCA
CAGCCTACATGGAGCTGAGGAGCCTGAGATCTGACGACACGGCCGTGTATTACTGTGC
GAGAGTCCCGGGCGTAAGTGGGAGCTATCCAGACTACTACTACATGGACGTCTGGGG
CAAGGGAACCCTGGTCACCGTCTCCTCA (SEQ ID NO: 112)
Her2_S1R3B2_BMV_1G2
V_{L} with CDR1, CDR2 and CDR3 underlined
GACATCCAGATGACCCAGTCTCCTTCCACCCTGTCTGCATCTATTGGAGACAGAGTCAC
CATCACCTGCCGGGCCAGTGAGGGTATTTATCACTGGTTGGCCTGGTATCAGCAGAAG
CCAGGGAAAGCTCCTAAACTCCTGATCTATAAGGCCTCTAGTTTAGCCAGTGGGGCCC
CATCAAGGTTCAGCGGCAGTGGATCTGGGACAGATTTCACTCTCACCATCAGCAGCCT
GCAGCCTGATGATTTTGCAACTTATTACTGCCAACAATATAGTAATTATCCGCTCACTTT
CGGCGGAGGGACCAAGCTGGAGATCAAA (SEQ ID NO: 113)
Her2_S1R3B2_BMV_1H5
V_{H} with CDR1, CDR2 and CDR3 underlined
GAGGTGCAGCTGGTGCAGTCTGGGGGAGGCTTGGTCAGGCCTGGAGGGTCCCTGAGA
CTCTCCTGTGCAGCCTCGGGATTCTCCTTCAGTGACTACTACATGACCTGGATCCGCCA
GATTCCAGGGAAGGGGCTGGAGTGGGTGGCAGTTATATGGAATGATGGAAGTGATAGA
TACTATGCAGACTCCGTGAAGGGCCGATTCACCATTTCCAGAGACAATTCCAAGAACAC
GCTGTTTCTGCAAATGAGCAGCCTGAGAGACGAGGACACGGCTCTATATTACTGTGTG
AGAGGGGGACCAACAGCTTCAAGCGGATTTGACTACTGGGGCCGAGGCACCCTGGTC
ACCGTCTCGAG (SEQ ID NO: 114)
Her2_S1R3B2_BMV_1H5
V_{L} with CDR1, CDR2 and CDR3 underlined
TCGTCTGAGCTGACTCAGCCTGCCTCCGTGTCTGGGTCTCCTGGACAGTCGATCACCA
TCTCCTGCACTGGAACCAGCAGTGACGTTGGTGGTTATAACTATGTCTCCTGGTACCTA
CAACACCCAGGCAAAGCCCCCAAACTCATGATTTATGAGGGCAGTAAGCGGCCCTCAG
GGGTTTCTAATCGCTTCTCTGGCTCCAAGTCTGGCAACACGGCCTCCCTGACAATCTCT
GGGCTCCAGGCTGAGGACGAGGCTGATTATTACTGCAGCTCATATACAACCAGGAGCA
CTCGAGTTTTCGGCGGAGGGACCAAGCTGACCGTCCTA (SEQ ID NO: 115)
Her2_S1R3C1_CS_1A6
V_{H} with CDR1, CDR2 and CDR3 underlined
GAGGTGCAGCTGGTGCAGTCTGGGGCAGAGGTGAAAAAGCCCGGGGAGTCTCTGAAG
ATCTCCTGTAAGGGTTTTGGATACAATTTTCGCAGCGCCTGGATCGGCTGGGTGCGCC
AGATGCCCGGCAAAGGCCTGGAGTGGATGGGGGTCATCTATCCTGGTGACTCTGATGT
CAGATACAGTCCGTCCTTCCAAGGCCAGGTCACCATCTCAGCCGACAAGTCCATCAGT
ACCGCCTACCTGCAGTGGAGCAGCCTGAAAGCCTCGGACACCGCCATGTATTATTGTA
CGAGACCCGTAGGGCAGTGGGTGGACTCTGACTATTGGGGCAAGGGAACCCTGGTCA
CCGTCTCGAGT (SEQ ID NO: 116)
Her2_S1R3C1_CS_1A6
V_{L} with CDR1, CDR2 and CDR3 underlined
CAGTCTGTGTTGACGCAGCCGCCCTCAGCGTCTGGGACCCCCGGACAGAGGGTCACC
ATCTCTTGTTCTGGAAGCAGCTCCAACATCGGAACTAATACTGTGAACTGGTACCAGCA
GCTTCCAGGAACGGCCCCCAAACTCCTCATCTATACTAGTAATCAGCGGCCCTCAGGG
GTCCCTGCCCGCTTCTCTGCCTCCAACTCTGGCACCTCAGCCTCCCTGGCCATCAGTG
GGCTCCGGTCCGAGGATGAGGCTGATTATTATTGTGCAGCGTGGGATGACAAGTTGAG
TGGTGCGGTGTTCGGCGGAGGGACCAAGCTGACCGTCCTA (SEQ ID NO: 117)
Her2_S1R3B2_DP47_1C9
V_{H} with CDR1, CDR2 and CDR3 underlined
GAGGTGCAGCTGTTGGAGTCTGGGGGAGGCTTGGTACAGCCTGGGGGGTCCCTGAGA
CTCTCCTGTGCAGCCTCTGGATTCACCTTTAGCAGCTATGCCATGAGCTGGGTCCGCC
AGGCTCCAGGGAAGGGGCTGGAGTGGGTCTCAGCTATTAGTGGTAGTGGTGGTAGCA
CATACTACGCAGACTCCGTGAAGGGCCGGTTCACCATCTCCAGAGACAATTCCAAGAA
CACGCTGTATCTGCAAATGAACAGCCTGAGAGCCGAGGACACGGCCGTGTATTACTGT
GCGAGATGGAGGCCTCTTCTAGACTACCACTTTGACCAATGGGGCCAAGGGACAATGG
TCACCGTCTCGAGT (SEQ ID NO: 118)
Her2_S1R3B2_DP47_1C9
V_{L} with CDR1, CDR2 and CDR3 underlined
CAGTCTGTGCTGACTCAGCCACCCTCAGCGTCTGGGACCCCCGGACAGACGGTAACAA
TCTCTTGTTCTGGAAGCAGCTCCAACATCGGAAGTAGTGTTGTTAATTGGTACCAGCAG
TTCCCAGGAACGGCCCCCAAAGTCCTCGTCTATAGTAACACTCAGCGGCCCTCAGGGG
TCCCTGACCGATTCTCTGGCTCCAGGTCTGGCACCTCAGCCTCCCTGGCCATCAGTGG
GCTCCAGTCTGAGGATGAGGCTGATTATTACTGTTTAGCATGGGATGCCAGCCTGAATG
GTTGGGTGTTCGGCGGAGGGACCAAGCTGACCGTCCTA (SEQ ID NO: 119)
Her2_S1R3B2_DP47_1E10
V_{H} with CDR1, CDR2 and CDR3 underlined
GAGGTGCAGCTGTTGGAGTCTGGGGGAGGCTTGGTACAGCCTGGGGGGTCCCTGAGA
CTCTCCTGTGCAGCCTCTGGATTCACCTTTAGCAGCTATGCCATGAGCTGGGTCCGCC
AGGCTCCAGGGAAGGGGCTGGAGTGGGTCTCAGCTATTAGTGGTAGTGGTGGTAGCA
CATACTACGCAGACTCCGTGAAGGGCCGGTTCACCATCTCCAGAGACAATTCCAAGAA
CACGCTGTATCTGCAAATGAACAGCCTGAGAGCCGAGGACACGGCCGTGTATTACTGT
GCGAGAGGATACAGTGGCTACGATGACCCTGACTCCTGGGGGAGAGGGACCACGGTC
ACCGTCTCGAGT (SEQ ID NO: 120)
Her2_S1R3B2_DP47_1E10
V_{L} with CDR1, CDR2 and CDR3 underlined
CACGTTATACTGACTCAACCGCCCTCAACGTCTGGGACCCCCGGGCAGACGGTCACCA
TCTCTTGTTCTGGGAGCAGCTCCAACATCGGAAGTCATTATGTATACTGGTACCAGCAG
CTCCCAGGAACGGCCCCCAAACTCCTCATCTATAGGAATAATCAGCGGCCCTCAGGGG
TCCCTGACCGATTCTCTGGCTCCAAGTCTGGCACCTCAGCCTCCCTGGCCATCAGTGG
GCTCCGGTCCGAGGATGAGACTGATTATTACTGTGCAGCATGGGATGACAGCCTGAGT
GGTCGAGTCTTCGGAACTGGGACCAAGCTGACCGTCCTA (SEQ ID NO: 121)
Her2_S1R3C1_CS_1B10
V_{H} with CDR1, CDR2 and CDR3 underlined
CAGGTACAGCTGCAGCAGTCAGGGGCTGAGGTGAAGAAGCCTGGGTCCTCGGTGAAG
GTCTCCTGCAAGGCTTCTGGAGGCACCATCAGCAACTATGCTATCAGTTGGGTGCGGC
TGGCCCCTGGACAAGGTCTTGAGTGGATGGGAAGTATCGTCCCTCTTCATGGGACAAC
AAACTTCGCACAGAAATTCCAGGGCAGAGTCACGATCACCGCGGACGAGTCCACGAGC
ACATCCTACATGGAGGTGAACGTCCTGACATATGAAGACACGGCGATGTATTATTGTGC
GTCTCTCAATTGGGGCTACTGGGGCCGGGGCACCCTGGTCACCGTCTCGAGT (SEQ ID NO: 122)
Her2_S1R3C1_CS_1B10
V_{L} with CDR1, CDR2 and CDR3 underlined
AATTTTATGCTGACTCAGCCCCACTCTGTGTCGGAGTCTCCGGGGAAGACGGTAACCA
TCTCCTGCACCGGCAGTAGTGGCAGCATTGCCAGCAACTATGTGCAGTGGTACCAGCA
GCGCCCGGACAGTGCCCCCACCACTGTGATCTATGAGGATAATCGAAGATCCTCTGGA
GTCCCTGATCGGTTCTCTGGCTCCATCGACAGCTCCTCCAACTCTGCCTCCCTCAGCAT
CTCTGGACTGAAGACTGAGGACGAGGCTGACTACTACTGTCAGTCCTATGATAGTAGC
GGTCATGTGGTCTTCGGCGGAGGGACCAAGCTGACCGTCCTA (SEQ ID NO: 123)
Her2_S1R3A1_BMV_1F3
V_{H} with CDR1, CDR2 and CDR3 underlined
GAGGTGCAGCTGGTGGAGTCTGGGGAAGGCCTGGTCAAGCCTGGGGGGTCCCTGAG
ACTCTCCTGTACAGCCTCTGGATTCACCTTCAGGAGTTATAGCTTGAACTGGGTCCGCC
AGGCTCCAGGGCAGGGGCTGGAGTGGGTCTCATCCATTAGTAGTACTAGTACTTACAT
ATACTACGCAGACTCGGTGAAGGGCCGATTCACCATCTCCAGAGACGACGCCAAGAAC
ACACTGTATCTGCAAATGAACAGCCTGAGAGCCGAAGACACAGCTGCATATTACTGTGT
TAGACTGGGATCTGGTGGGGGATATTTTCCTGACTACTGGGGCAGGGGCACCCTGGTC
ACCGTCTCGAGT (SEQ ID NO: 124)
Her2_S1R3A1_BMV_1F3
V_{L} with CDR1, CDR2 and CDR3 underlined
TCGTCTGAGCTGACTCAGGACCCTGCTGTGTCTGTGGCCTTGGGACAGACAGTCAGGA
TCACATGCCAAGGAGACAGCCTCAGAAGCTATTATGCAAGCTGGTACCAGCAGAAGCC
AGGACAGGCCCCTGTACTTGTCATCTATGGTAAAAACAACCGGCCCTCAGGGATCCCA
GACCGATTCTCTGGCTCCAGCTCAGGAAACACAGCTTCCTTGACCATCACTGGGGCTC
AGGCGGAAGATGAGGCTGACTATTACTGTAACTCCCGGGACAGCAGTGGTAACCATGT
GGTATTCGGCGGAGGGACCAAGCTGACCGTCCTA (SEQ ID NO: 125)
Her2_S1R3B1_BMV_1G11
V_{H} with CDR1, CDR2 and CDR3 underlined
CAGGTGCAGCTGGTGCAGTCTGGGGGAGGCTTGGTCCAGCCGGGGGGGTCCCTGAG
ACTCTCCTGTGCAGCCTCTGGATTCACGTTTAGTACCTATGCCATGAGTTGGGCCCGCC
AGGCTCCAGGGAAGGGGCTGGAGTGGGTCTCAAGTATTAGTGGTGATGGTGGAAGAA
TTCTCGATGCAGACTCCGCGAAGGGCCGGTTCACCATCTCCAGAGACAATTCCAAGAA
CACGCTGTATCTGCAAATGAACGGCCTGAGAGTCGAGGACACGGCCCTTTATTACTGT
GCGAGAGCGGACGGTAACTACTGGGGCAGGGGGACAATGGTCACCGTCTCTTCA (SEQ ID NO: 126)
Her2_S1R3B1_BMV_1G11
V_{L} with CDR1, CDR2 and CDR3 underlined
CAGTCTGTGCTGACTCAGCCTGCCTCCGTGTCTGGGTCTCCTGGACAGTCGATCACCA
TCTCCTGCACTGGAACCAGCAGTGACGTTGGTGGTTATAACTATGTCTCCTGGTACCAA
CAACACCCAGGCAAAGCCCCCAAACTCATGATTTATGAGGGCAGTAAGCGGCCCTCAG
GGGTTTCTAATCGCTTCTCTGGCTCCAAGTCTGGCAACACGGCCTCCCTGACAATCTCT
GGGCTCCAGGCTGAGGACGAGGCTGATTATTACTGCAGCTCATATACAACCAGGAGCA
CTCGAGTTTTCGGCGGAGGGACCAAGCTGACCGTCCTA (SEQ ID NO: 127)
Her2_S1R3A1_BMV_1G4
V_{H} with CDR1, CDR2 and CDR3 underlined
CAGGTGCAGCTGGTGGAGTCTGGGGCTGAGGTGAAGAAGCCTGGGGCCTCAGTGAAG
GTCTCCTGCAAGGCTTCTGGATACACCTTCACCAGTTATGATATCAACTGGGTGCGACA
GGCCCCCGGACAAAGGCTTGAGTGGATGGGATGGATCAACGCTGGCAATGGTAACAC
AAAATATTCACAGAAGTTCCAGGGCAGAGTCACCATTACCAGGGACACATCCGCGAGC
ACAGCCTACATGGAGCTGAGGAGCCTGAGATCTGACGACACGGCCGTGTATTACTGTG
CGAGAGGGAGGAGCTATGGCCACCCGTACTACTTTGACTACTGGGGCCAGGGAACCC
TGGTCACCGTCTCGAGT (SEQ ID NO: 128)
Her2_S1R3A1_BMV_1G4
V_{L} with CDR1, CDR2 and CDR3 underlined
CAGTCTGTGCTGACTCAGCCTGCCTCCGTGTCTGGGTCTCCTGGACAGTCGATCACCA
TCTCCTGCACTGGAACCAGCAGTGACGTTGGTGGTTATAACTATGTCTCCTGGTACCAA
CAACACCCAGGCAAAGCCCCCAAACTCATGATTTATGAGGGCAGTAAGCGGCCCTCAG
GGGTTTCTAATCGCTTCTCTGGCTCCAAGTCTGGCAACACGGCCTCCCTGACAATCTCT
GGGCTCCAGGCTGAGGACGAGGCTGATTATTACTGCAGCTCATATACAACCAGGAGCA
CTCGAGTTTTCGGCGGAGGGACCAAGCTGACCGTCCTA (SEQ ID NO: 129)
Her2_S1R3B1_BMV_1H11
V_{H} with CDR1, CDR2 and CDR3 underlined
GAGGTGCAGCTGGTGCAGTCTGGGGGAGGCCTGGTCAAGCCTGGGGGGTCCCTGAG
ACTCTCCTGTGCAGCGTCTGGATTCACCTTCAGTAGCTATGGGATGCACTGGGTCCGC
CAGGCTCCAGGCAAGGGGCTGGAGTGGGTGGCAGGTATTTTTTATGATGGAGGTAATA
AATACTATGCAGACTCCGTGAAGGGCCGATTCACCATCTCCAGAGACAATTCCAAGAAC
ACGCTGTATCTGCAAATGAACAGCCTGAGAGCTGAGGACACGGCTGTGTATTACTGTG
CGAGAGATAGGGGCTACTACTACATGGACGTCTGGGGCAAAGGGACCACGGTCACCG
TCTCCTCA (SEQ ID NO: 130)
Her2_S1R3B1_BMV_1H11
V_{L} with CDR1, CDR2 and CDR3 underlined
CAGTCTGTGTTGACGCAGCCGCCCTCAGTGTCTGGGGCCCCAGGACAGAGGGTCACC
ATCTCCTGCACTGGGAGAAGCTCCAACATCGGGGCGGGTCATGATGTACACTGGTACC
AGCAACTTCCAGGAACAGCCCCCAAACTCCTCATCTATGGTGACAGCAATCGGCCCTC
AGGGGTCCCTGACCGATTCTCTGGCTCCAGGTCTGGCACCTCAGCCTCCCTGGCCATC
ACTGGGCTCCAGGCTGAAGATGAGGCTGATTATTACTGCCAGTCCTATGACAGCAGCC
TGAGGGGTTCGGTATTCGGCGGAGGGACCAAGGTCACCGTCCTA (SEQ ID NO: 131)
Her2_S1R3A1_CS_1B9
V_{H} with CDR1, CDR2 and CDR3 underlined
AAGGTGCAGCTGGTGCAGTCTGGGACAGAGGTGAAAAAGCCCGGGGAGTCTCTGAAG
ATCTCCTGTCAGGGTTCTGGATACAGGTTTAGTAGTGACTGGATTGCCTGGGTGCGCC
AGATGCCCGGGAAAGGCCTGGAGTGGATGGGGATTGTCTATCCTGGTGACTCTGATAC
CAGATATAGCCCGTCCTTCCAAGGCCAAGTCACCATCTCAGCCGACAAGTCCATCAGTA
CTGCCTACCTGCAGTGGAGCGGCCTGAAGGCCTCGGACACCGCCAAGTATTACTGTGC
GAGAGTGCAACAGGCAGTGGGAGCTAAAGGTTATGCTATGGACGTCTGGGGCAAGGG
AACCCTGGTCACCGTCTCGAGT (SEQ ID NO: 132)
Her2_S1R3A1_CS_1B9
V_{L} with CDR1, CDR2 and CDR3 underlined
CAGACTGTGGTGATCCAGGAGCCATCGTTCTCAGTGTCCCCTGGAGGGACAGTCACAC
TCACTTGTGGCTTGAGCTCTGGCTCAGTCTCTACCAGTTACTACCCCAGCTGGTACCGG
CAGACCCCAGGCCAGGCTCCACACACACTCATTCACAACACAAAGATTCGCTCCTCTG
GGGTCCCTGATCGCTTCTCTGGCTCCATCCTTGGGAACAATGCTGCCCTCACCATCAC
GGGGGCCCAGGCAGATGATGAATCTGATTATTACTGTCTTTTGTATATGGGTAGCGGCA
TTTACGTGTTCGGCGGAGGGACCAAGCTGACCGTCCTA (SEQ ID NO: 133)
Her2_S1R3B1_BMV_1H9
V_{H} with CDR1, CDR2 and CDR3 underlined
CAGGTGCAGCTGCAGGAGTCGGGCGCAGGACTGGTGAAGCCTTCGGGGACCCTGTCC
CTCACCTGCGCTGTCTCTGGTGGCTCCATCAGCAGTGGTAACTGGTGGAGTTGGGTCC
GCCAGCCCCCAGGGAAGGGGCTGGAGTGGATTGGGGAAATCTCTCATAGTGGGAGCA
CCAACTACAACCCGTCCCTCAAGAGTCGAGTCACCATATCAGTAGACAAGTCCAAGAAC
CAGTTCTCCCTGAACCTGAGTTCTGTGACCGCCGCAGACACGGCCGTGTATTACTGTG
CGAGAGTAAGGGGTACGGTGGGGGATACACGGGGACCTGACTACTGGGGCCAGGGA
ACCCTGGTCACCGTCTCGAGT (SEQ ID NO: 134)
Her2_S1R3B1_BMV_1H9
V_{L} with CDR1, CDR2 and CDR3 underlined
TCGTCTGAGCTGACTCAGGACCCTGCTGTGTCTGTGGCCTTGGGACAGACAGTCAGGA
TCACATGCCAAGGAGACAGCCTCAGAAGCTATTATGCAAGCTGGTACCAGCAGAAGCC
AGGACAGGCCCCTGTACTTGTCATCTATGGTAAAAACAACCGGCCCTCAGGGATCCCA
GACCGATTCTCTGGCTCCAGCTCAGGAAACACAGCTTCCTTGACCATCACTGGGGCTC
AGGCGGAAGATGAGGCTGACTATTACTGTAACTCCCGGGACAGCAGTGGTAACCATGT
GGTATTCGGCGGAGGGACCAAGCTGACCGTCCTA (SEQ ID NO: 135)
Her2_S1R3A1_CS_1B10
V_{H} with CDR1, CDR2 and CDR3 underlined
GAAGTGCAGCTGGTGCAGTCTGGGGCTGAGGTGAAGAAGCCTGGGGCCTCAGTGAGG
GTCTCCTGCAAGGGTTCTGGAAACACCTTCACCGGCCACTACATCCACTGGGTGCGAC
AGGCCCCTGGACAAGGACTTGAGTGGCTGGGATGGATCGACCCTAACACTGGTGACAT
ACAGTATTCAGAAAACTTTAAGGGCTCGGTCACCTTGACCAGGGACCCATCCATCAACT
CAGTCTTCATGGACCTGATCAGGCTGACATCTGACGACACGGCCATGTATTACTGTGC
GAGAGAAGGTGCCGGGCTCGCCAACTACTATTACTACGGTCTGGACGTCTGGGGCCG
AGGGACAATGGTCACCGTCTCGAGT (SEQ ID NO: 136)
Her2_S1R3A1_CS_1B10
V_{L} with CDR1, CDR2 and CDR3 underlined
CAGACTGTGGTGCTCCAGGAGCCTTCGTTCTCAGTGTCCCCTGGGGGGACAGTCACAC
TCACTTGTGGCTTGAACTTTGGCTCAGTCTCTACTGCTTACTACCCCAGTTGGTACCAG
CAGACCCCAGGCCAAGCTCCACGCACGCTCATCTACGGCACAAATATTCGTTCCTCTG
GGGTCCCGGATCGCTTCTCTGGCTCCATCGTAGGGAACAAAGCTGCCCTCACCATCAC
GGGGGCCCAGACAGAAGATGAGTCTGATTATTATTGTGCGCTGTATATGGGTAGTGGC
ATGCTCTTCGGCGGCGGGACCAAGGTCACCGTCCTA (SEQ ID NO: 137)
Her2_S1R3B1_BMV_1C12
V_{H} with CDR1, CDR2 and CDR3 underlined
GAGGTGCAGCTGGTGCAGTCTGGGGGAGGCGTGGTCCAGCCTGGGAGGTCCCTGAG
ACTCTCCTGTGCAGCCTCTGGATTCACCTTCAGTAGCTATGGCATGCACTGGGTCCGC
CAGGCTCCAGGCAAGGGGCTGGAGTGGGTGGCAGTTATATCATATGATGGAAGTATTA
AATACTATGCAGACTCCGTGAAGGGCCGATTCACCATCTCCAGAGACAATTCCAAGAAC
ACGCTGTATCTGCAAATGAACAGCCTGAGAGCTGAGGACACGGCTGTGTATTACTGTG
CGCGAACTGGTGAATATAGTGGCTACGATACGAGTGGTTACAGCAATTGGGGCCAAGG
CACCCTGGTCACCGTCTCGAGT (SEQ ID NO: 138)
Her2_S1R3B1_BMV_1C12
V_{L} with CDR1, CDR2 and CDR3 underlined
CAGTCTGTGCTGACTCAGCCACCCTCAGCGTCTGGGACCCCCGGGCAGAGGGTCACC
ATCTCTTGTTCTGGAAGCAGCTCCAACATCGGGAGTAACACTGTAAACTGGTACCAGCG
ACTCCCAGGAGCGGCCCCCCAACTCCTCATCTACAATAATGACCAGCGGCCCTCAGGG
ATCCCTGACCGATTCTCTGGCTCCAAGTCTGGCACCTCAGGCTCCCTGGTCATCAGTG
GGCTCCAGTCTGAAGATGAGGCTGATTACTACTGTGCGTCATGGGATGACAGTCTGAA
TGGTCGGGTGTTCGGCGGAGGGACCAAGCTGACCGTCCTA (SEQ ID NO: 139)
Her2_S1R3C1_BMV_1H11
V_{H} with CDR1, CDR2 and CDR3 underlined
GGGGTGCAGCTGGTGGAGTCTGGGGGAGGCCTGGTCAAGCCTGGGGGGTCCCTGAG
ACTCTCCTGTGCAGCCTCTGGATTCACCTTCAGTAGCTATAACATGAACTGGGTCCGCC
AGGCTCCAGGGAAGGGACTGGAGTGGGTCTCAGCTATTAGTGGTAGTGGTGGTAGCA
CATACTACGCAGACTCCGTGACGGGCCGGTTCACCATCTCCAGAGACAATTCCAAGAA
CACGCTGTATCTGCAAATGAACAGCCTGAGAGCCGAGGACACGGCCGTATATTACTGT
GCGAAAGATACCAGTGGCTGGTACGGGGACGGTATGGACGTCTGGGGCCGGGGAACC
CTGGTCACCGTCTCGAGT (SEQ ID NO: 140)
Her2_S1R3C1_BMV_1H11
V_{L} with CDR1, CDR2 and CDR3 underlined
GACATCCAGATGACCCAGTCTCCTTCCACCCTGTCTGCATCTATTGGAGACAGAGTCAC
CATCACCTGCCGGGCCAGTGAGGGTATTTATCACTGGTTGGCCTGGTATCAGCAGAAG
CCAGGGAAAGCCCCTAAACTCCTGATCTATAAGGCCTCTAGTTTAGCCAGTGGGGCCC
CATCAAGGTTCAGCGGCAGTGGATCAGGGACAGATTTCACTCTCACCATCAGCAGCCT
GCAGCCTGATGATTTTGCAACTTATTACTGCCAACAATATAGTAATTATCCGCTCACTTT
CGGCGGAGGGACCAAGCTGGAGATCAAA (SEQ ID NO: 141)
Her2_S1R3B1_BMV_1A10
V_{H} with CDR1, CDR2 and CDR3 underlined
CAGATGCAGCTGGTGCAGTCTGGGGGAGGCGTGGTCCAGCCTGGGAGGTCCCTGAGA
CTCTCCTGTGCAGCCTCTGGATTCACCTTCAGTAGCTATGGCATGCACTGGGTCCGCC
AGGCTCCAGGCAAGGGGCTGGAGTGGGTGGCAGTTATATCATATGATGGAAGTATTAA
ATACTATGCAGACTCCGTGAAGGGCCGATTCACCATCTCCAGAGACAATTCCAAGAACA
CACTGTATCTACAAATGAACAGCCTGAGAGCCGAGGACACGGGCGTTTATTACTGTTCG
AAAGATCGCTATAGCAGTGGCTGGTACAGCTCCGATGCTTTTGATATTTGGGGCCGAG
GGACAATGGTCACCGTCTCGAGT (SEQ ID NO: 142)
Her2_S1R3B1_BMV_1A10
V_{L} with CDR1, CDR2 and CDR3 underlined
TCTGAGCTGACTCAGGACCCTGCTGTGTCTGTGGCCTTGGGACAGACAGTCAGGATCA
CATGCCAAGGAGACAGCCTCAGAAGCTATTATGCAAGCTGGTACCAGCAGAAGCCAGG
ACAGGCCCCTGTACTTGTCATCTATGGTAAAAACAACCGGCCCTCAGGGATCCCAGAC
CGATTCTCTGGCTCCAGCTCAGGAAACACAGCTTCCTTGACCATCACTGGGGCTCAGG
CGGAAGATGAGGCTGACTATTACTGTCATTCCCGGGACAGCAGTGGTAACCATGTGCT
TTTCGGCGGAGGGACCAAGCTGACCGTCCTA (SEQ ID NO: 143)
Her2_S1R3A1_CS_1D11
V_{H} with CDR1, CDR2 and CDR3 underlined
GAGGTGCAGCTGGTGCAGTCTGGGGCAGAGGTGAAAAAGCCCGGAGAGTCTCTGAAG
ATCTCCTGTAAGGGCTCTGGATACACCTTTACCAACCACTGGATCGCCTGGGTGCGCC
AGATGCCCGGGAAAGGCCTGGAGTGGATGGGCATCATCTATCCTGGTGACTCTGAAAC
GAGGTACAGCCCGTCCTTCCAAGGCCACGTCACCATCTCAGCCGACAAGTCCATCAGT
ACCGCCTATTTGCAGTGGAGCACCCTGAAGGACTCGGACTCCGCCATGTACTTCTGTG
TGAGACAGGCCCGTGGCTGGGACGACGGACGGGCTGGATATTATTATTCCGGTATGGA
CGCCTGGGGCCAGGGAACCCTGGTCACCGTCTCGAGT (SEQ ID NO: 144)
Her2_S1R3A1_CS_1D11
V_{L} with CDR1, CDR2 and CDR3 underlined
CAGGCTGTGGTGCTCCAGGAGCCATCGTTCTCAGTGTCCCCTGGAGGGACAGTCACAC
TCACCTGTGGCTTGCGCTCTGGGTCAGTCTCTACTAGTCACTACCCCAGCTGGTACCA
GCAGACCCCAGGCCAGGCTCCACGCACGCTCATTTACAGCACAAACACTCGCTCTTCT
GGGGTCCCTGATCGCTTCTCTGGCTCCATCCTTGGGAACAAAGCTGCCCTCACCATCA
CGGGGGCCCAGGCAGATGATGAATCTAATTATTACTGTATGCTATACATGGGCAGTGG
CATGTATGTGTTCGGCGGAGGGACCAAGGTCACCGTCCTA (SEQ ID NO: 145)
Her2_S1R3C1_DP47_1H1
V_{H} with CDR1, CDR2 and CDR3 underlined
GAGGTGCAGCTGTTGGAGTCTGGGGGAGGCTTGGTACAGCCTGGGGGGTCCCTGAGA
CTCTCCTGTGCAGCCTCTGGATTCACCTTTAGCAGCTATGCCATGAGCTGGGTCCGCC
AGGCTCCAGGGAAGGGGCTGGAGTGGGTCTCAGCTATTAGTGGTAGTGGTGGTAGCA
CATACTACGCAGACTCCGTGAAGGGCCGGTTCACCATCTCCAGAGACAATTCCAAGAA
CACGCTGTATCTGCAAATGAACAGCCTGAGAGCCGAGGACACGGCCGTGTATTACTGT
GCGAGAGTCAGCGGGAGCCACTTTCCATTCTTTGACTCCTGGGGCCAGGGGACAATG
GTCACCGTCTCGAGT (SEQ ID NO: 146)
Her2_S1R3C1_DP47_1H1
V_{L} with CDR1, CDR2 and CDR3 underlined
CAGTCTGTGCTGACTCAGCCACCCTCGGTGTCAGTGGCCCCAGGACAGACGGCCAGA
ATTACCTGTGGGGGAGACAAGATTGGACATAAAAGTGTGCATTGGTATCAGCAGAAGC
CAGGCCAGGCCCCTGTGTTGCTCGTCTATGATGATAGGAAGCGGCCCTCAGGGATCCC
TGAGCGATTCTCTGGCTCCAACTCTGGGAACACGGCCACCCTGACCATCAGCAGGGTC
GAGGCCGGGGATGAGGCTGCCTATCACTGTCAGGTGTGGGATAGAAGTAGTGACCCTT
ATGTCTTCGGAACTGGGACCAAGGTCACCGTCCTA (SEQ ID NO: 147)
Her2_S1R3A1_CS_1B12
V_{H} with CDR1, CDR2 and CDR3 underlined
CAGGTGCAGCTGGTGCAATCTGGGGCTGAAGTGAAGAAGCCTGGGGCCTCAGTGAAG
GTCTCTTGTCAGGCTTCTGGATACACCTTCAGCGGGCACTATATGCACTTGGTGCGACA
GGCCCCTGGACAAGGGCTTGAGTGGATGGGGTGGATCCACCCTACCAGTGGTGGCAC
AACCTATGCACAGAAGTTTCAGGGCCGGGTCGTTATGACCAGGGACACGTCCATCAGC
ACAGCCTACATGGAACTGAGTAGGCTGACATCTGACGACACGGCCGTGTATTACTGTG
CAAGAATGTCCCAAAACTATGATGCTTTTGATATCTGGGGCCAAGGGACAATGGTCACC
GTCTCGAGT (SEQ ID NO: 148)
Her2_S1R3A1_CS_1B12
V_{L} with CDR1, CDR2 and CDR3 underlined
CAGGCTGTGCTGACTCAGCCGTCCTCAGTGTCTGGGGCCCCAGGGCAGAGGGTCACC
ATCTCCTGCACTGGGAGCAGCTCCAACATCGGGGCAGGTTATGATGTAAACTGGTACC
AACAATTTCCAGGAACAGCCCCCAAAATTATCGTCTATGGCGATCGGCCCTCAGGGGC
CCCTGACCGATTCTCTGGCTCCAAGTCTGGCACCTCAGCCTCCCTGGCAATCACTGGA
CTCCGGGCTGAGGATGAGGCTGATTATTACTGCCAGTCCTGGGACAGTCGCCTGAGTA
GTTATGTCTTCGGAACTGGGACCAAGGTCACCGTCCTA (SEQ ID NO: 149)
Her2_S1R3B1_BMV_1H5
V_{H} with CDR1, CDR2 and CDR3 underlined
CAGGTGCAGCTGCAGGAGTCGGGGGGAGGCGTGGTCCAGCCTGGGGGGTCCCTGAG
ACTCTCCTGTGCAGCGTCTGGATTCACCTTCAGTGGCTATGGCATGCACTGGGTCCGC
CAGGCTCCAGGCAAGGGGCTGGAGTGGGTGGCATCTGTACGGAACGATGGAAGTAAT
ACATACTACACAGACTCCGTGAAGGACCGATTCACCATCTCCAGAGACAACACCAAGAA
CACGCTGTATCTGCAAATGAACAGCCTGAGAGCCGAGGACACGGCCGTATATTACTGT
GCCAAGTCGAGAAGAGTGATGTATGGCACCTCCTATTACTTTGACTACTGGGGCAGAG
GCACCCTGGTCACCGTCTCCTCA (SEQ ID NO: 150)
Her2_S1R3B1_BMV_1H5
V_{L} with CDR1, CDR2 and CDR3 underlined
TCGTCTGAGCTGACTCAGGACCCTGCTGTGTCTGTGGCCTTGGGACAGACAGTCAGGA
TCACATGCCAAGGAGACAGCCTCAGAAGCTATTATGCAAGCTGGTACCAGCAGAAGCC
AGGACAGGCCCCTGTACTTGTCATCTATGGTAAAAACAACCGGCCCTCAGGGATCCCA
GACCGATTCTCTGGCTCCAGCTCAGGAAACACAGCTTCCTTGACCATCACTGGGGCTC
AGGCGGAAGATGAGGCTGACTATTACTGTAACTCCCGGGACAGCAGTGGTAACCATGT
GGTATTCGGCGGAGGGACCAAGCTGACCGTCCTA (SEQ ID NO: 151)
Her2_S1R3A1_DP47_1A6
V_{H} with CDR1, CDR2 and CDR3 underlined
GAGGTGCAGCTGTTGGAGTCTGGGGGAGGCTTGGTACAGCCTGGGGGGTCCCTGAGA
CTCTCCTGTGCAGCCTCTGGATTCACCTTTAGCAGCTATGCCATGAGCTGGGTCCGCC
AGGCTCCAGGGAAGGGGCTGGAGTGGGTCTCAGCTATTAGTGGTAGTGGTGGTAGCA
CATACTACGCAGACTCCGTGAAGGGCCGGTTCACCATCTCCAGAGACAATTCCAAGAA
CACGCTGTATCTGCAAATGAACAGCCTGAGAGCCGAGGACACGGCCGTGTATTACTGT
GCGAGAGATCTGGGAATAGACCCCCTTTGGAGTGGTTATTACACACCCCTTGACTATTG
GGGCCGAGGGACAATGGTCACCGTCTCGAGT (SEQ ID NO: 152)
Her2_S1R3A1_DP47_1A6
V_{L} with CDR1, CDR2 and CDR3 underlined
CACGTTATACTGACTCAACCGCCCTCAGCGTCTGGGACCCCCGGGCAGAGGGTCACC
ATCTCTTGTTCTGGAAGCAGCTCCAACATCGGAAGTAATTCCGTTAGCTGGTACCAGCA
GCTCCCAGGAACGGCCCCCAAACTCCTCATGTATACTAACAATCAGCGGCCCTCAGGG
GTCCCTGACCGATTCTCTGGCTCCAAGTCTGGCACCTCAGCCTCCCTGGCCATCAGTG
GGCTCCAGTCTGAGGATGAGGCTGATTATTACTGTGCGACATGGGATGCCAGCCTGAA
TACTTGGGTGTTCGGCGGAGGGACCAAGGTCACCGTCCTA (SEQ ID NO: 153)
Her2_S1R3B1_DP47_1E1
V_{H} with CDR1, CDR2 and CDR3 underlined
GAGGTGCAGCTGTTGGAGTCTGGGGGAGGCTTGGTACAGCCTGGGGGGTCCCTGAGA
CTCTCCTGTGCAGCCTCTGGATTCACCTTTAGCAGCTATGCCATGAGCTGGGTCCGCC
AGGCTCCAGGGAAGGGGCTGGAGTGGGTCTCAGCTATTAGTGGTAGTGGTGGTAGCA
CATACTACGCAGACTCCGTGAAGGGCCGGTTCACCATCTCCAGAGACAATTCCAAGAA
CACGCTGTATCTGCAAATGAACAGCCTGAGAGCCGAGGACACGGCCGTGTATTACTGT
GCGAGAGGCGGGAGTGGGAGTGACTACTGGGGCCAGGGGACAATGGTCACCGTCTC
GAGT (SEQ ID NO: 154)
Her2_S1R3B1_DP47_1E1
V_{L} with CDR1, CDR2 and CDR3 underlined
AATTTTATGCTGACTCAGCCCCACTCTGTGTCGGGGTCTCCGGGGAAGACGGTAACCA
TCTCCTGCACCCGCAGCAGTGGCTACATTGACAGCAAGTATGTGCAGTGGTACCAGCA
GCGCCCGGGCAGTGCCCCCACCACTGTGATCTATGAGGATAACCGAAGACCCTCTGG
GGTCCCTGATCGGTTCTCTGGCTCCATCGACAGCTCCTCCAACTCTGCCTCCCTCACC
ATCTCTGGACTGGAGACTGAGGACGAGGCTGACTATTACTGTCAGTCTTATGATGACAC
CAATGTGGTGTTCGGCGGAGGGACCAAGGTCACCGTCCTA (SEQ ID NO: 155)
Her2_S1R3B1_BMV_1A1
V_{H} with CDR1, CDR2 and CDR3 underlined
GAGGTCCAGCTGGTGCAGTCTGGAGCTGAGGTGAAGGAGCCTGGGGCCTCAGTGAAG
GTCTCCTGCAAGGCCTCTGGTTACGACTTTTCCAACTATGGTTTCAGCTGGGTGCGCCA
GGCCCCTGGACAAGGTCTTGAGTGGATGGGATGGATCAGCTCTTATAATGGTTACACA
AACTATGCACAGAGACTCCAGGGCAGAGTCACCATGACCACAGACACATCCACGAGCA
CAGCCTACATGGAGCTGAGGAGCCTGAGATCTGACGACACAGCTGTCTATTACTGTGC
GAGAGATCGAGGACTTGGAAACTGGTACTTCGATCTCTGGGGCCAAGGCACCCTGGTC
ACCGTCTCGAGT (SEQ ID NO: 156)
Her2_S1R3B1_BMV_1A1
V_{L} with CDR1, CDR2 and CDR3 underlined
CAGTCTGTGCTGACTCAGCCTGCCTCCGTGTCTGGGTCTCCTGGACAGTCGATCACCA
TCTCCTGCACTGGAACCAGCAGTGACGTTGGTGGTTATAACTATGTCTCCTGGTACCAA
CAACACCCAGGCAAAGCCCCCAAACTCATGATTTATGAGGGCAGTAAGCGGCCCTCAG
GGGTTTCTAATCGCTTCTCTGGCTCCAAGTCTGGCAACACGGCCTCCCTGACAATCTCT
GGGCTCCAGGCTGAGGACGAGGCTGATTATTACTGCAGCTCATATACAACCAGGAGCA
CTCGAGTTTTCGGCGGAGGGACCAAGCTGACCGTCCTA (SEQ ID NO: 157)
>HER018_CDS
atggattttcaagtgcagattttcagcttcctgctaatcagtgcttcagtcataatgtccagaggagatattcagatgacccagagcc
cgagcagcctgagcgcgagcgtgggcgatcgcgtgaccattacctgccgcgcgagccaggatgtgaacaccgcggtggcgt
ggtatcagcagaaaccgggcaaagcgccgaaactgctgatttatagcgcgagctttctgtatagcggcgtgccgagccgcttta
gcggcagccgcagcggcaccgattttaccctgaccattagcagcctgcagccggaagattttgcgacctattattgccagcagca
ttataccaccccgccgacctttggccagggcaccaaagtggaaattaaacgcaccgggggtggaggctctggtggcggtggct
ctggcggaggtggatccggtggcggcggatctgaagtgcagctggtggaaagcggcggcggcctggtgcagccgggcggca
gcctgcgcctgagctgcgcggcgagcggctttaacattaaagatacctatattcattgggtgcgccaggcgccgggcaaaggcc
tggaatgggtggcgcgcatttatccgaccaacggctatacccgctatgcggatagcgtgaaaggccgctttaccattagcgcgga
taccagcaaaaacaccgcgtatctgcagatgaacagcctgcgcgcggaagataccgcggtgtattattgcagccgctggggcg
gcgatggcttttatgcgatggattattggggccagggcaccctggtgaccgtgagcagtgatcaggagcccaaatcttgtgacaa
aactcacacatctccaccgtgctcagcacctgaactcctgggtggaccgtcagtcttcctcttccccccaaaacccaaggacacc
ctcatgatctcccggacccctgaggtcacatgcgtggtggtggacgtgagccacgaagaccctgaggtcaagttcaactggtac
gtggacggcgtggaggtgcataatgccaagacaaagccgcgggaggagcagtacaacagcacgtaccgtgtggtcagcgtc
ctcaccgtcctgcaccaggactggctgaatggcaaggagtacaagtgcaaggtctccaacaaagccctcccagcccccatcg
agaaaaccatctccaaagccaaagggcagccccgagaaccacaggtgtacaccctgcccccatcccgggatgagctgacc
aagaaccaggtcagcctgacctgcctggtcaaaggcttctatccaagcgacatcgccgtggagtgggagagcaatgggcagc
cggagaacaactacaagaccacgcctcccgtgctggactccgacggctccttcttcctctacagcaagctcaccgtggacaag
agcaggtggcagcaggggaacgtcttctcatgctccgtgatgcatgaggctctgcacaaccactacacgcagaagagcctctc
cctgtctccgggtaaatga (SEQ ID NO: 158)
>HER018_Protein_leader-stop
MDFQVQIFSFLLISASVIMSRGDIQMTQSPSSLSASVGDRVTITCRASQDVNTAVAWYQQKP
GKAPKLLIYSASFLYSGVPSRFSGSRSGTDFTLTISSLQPEDFATYYCQQHYTTPPTFGQGT
KVEIKRTGGGGSGGGGSGGGGSGGGGSEVQLVESGGGLVQPGGSLRLSCAASGFNIKDT
YIHWVRQAPGKGLEWVARIYPTNGYTRYADSVKGRFTISADTSKNTAYLQMNSLRAEDTAV
YYCSRWGGDGFYAMDYWGQGTLVTVSSDQEPKSCDKTHTSPPCSAPELLGGPSVFLFPP
KPKDTLMISRTPEVTCVVVDVSHEDPEVKFNWYVDGVEVHNAKTKPREEQYNSTYRVVSV
LTVLHQDWLNGKEYKCKVSNKALPAPIEKTISKAKGQPREPQVYTLPPSRDELTKNQVSLTC
LVKGFYPSDIAVEWESNGQPENNYKTTPPVLDSDGSFFLYSKLTVDKSRWQQGNVFSCSV
MHEALHNHYTQKSLSLSPGK (SEQ ID NO: 159)
>HER018_2h7_Leader_CDS
atggattttcaagtgcagattttcagcttcctgctaatcagtgcttcagtcataatgtccagagga (SEQ ID NO: 160)
>HER018_2h7_Leader_Protein
MDFQVQIFSFLLISASVIMSRG (SEQ ID NO: 161)
>HER018_VL_CDS
Gatattcagatgacccagagcccgagcagcctgagcgcgagcgtgggcgatcgcgtgaccattacctgccgcgcgagccag
gatgtgaacaccgcggtggcgtggtatcagcagaaaccgggcaaagcgccgaaactgctgatttatagcgcgagctttctgtat
agcggcgtgccgagccgctttagcggcagccgcagcggcaccgattttaccctgaccattagcagcctgcagccggaagatttt
gcgacctattattgccagcagcattataccaccccgccgacctttggccagggcaccaaagtggaaattaaacgcacc (SEQ ID NO: 162)
>HER018_VL_Protein
DIQMTQSPSSLSASVGDRVTITCRASQDVNTAVAWYQQKPGKAPKLLIYSASFLYSGVPSR
FSGSRSGTDFTLTISSLQPEDFATYYCQQHYTTPPTFGQGTKVEIKRT (SEQ ID NO: 163)
>HER018_G4Sx4_Linker_CDS
gggggtggaggctctggtggcggtggctctggcggaggtggatccggtggcggcggatct(SEQ ID NO: 164)
>HER018_G4Sx4_Linker_Protein
GGGGSGGGGSGGGGSGGGGS (SEQ ID NO: 165)
>HER018_VH_CDS
gaagtgcagctggtggaaagcggcggcggcctggtgcagccgggcggcagcctgcgcctgagctgcgcggcgagcggcttt
aacattaaagatacctatattcattgggtgcgccaggcgccgggcaaaggcctggaatgggtggcgcgcatttatccgaccaac
ggctatacccgctatgcggatagcgtgaaaggccgctttaccattagcgcggataccagcaaaaacaccgcgtatctgcagatg
aacagcctgcgcgcggaagataccgcggtgtattattgcagccgctggggcggcgatggcttttatgcgatggattattggggcc
agggcaccctggtgaccgtgagcagt(SEQ ID NO: 166)
>HER018_VH_Protein
EVQLVESGGGLVQPGGSLRLSCAASGFNIKDTYIHWVRQAPGKGLEWVARIYPTNGYTRY
ADSVKGRFTISADTSKNTAYLQMNSLRAEDTAVYYCSRWGGDGFYAMDYWGQGTLVTVSS (SEQ ID NO: 167)
>HER018_CSCS_Hinge_CDS
gagcccaaatcttgtgacaaaactcacacatctccaccgtgctca (SEQ ID NO: 168)
>HER018_CSCS_Hinge_Protein
EPKSCDKTHTSPPCS (SEQ ID NO: 169)
>HER018_Fc_Stop_CDS
gcacctgaactcctgggtggaccgtcagtcttcctcttccccccaaaacccaaggacaccctcatgatctcccggacccctgagg
tcacatgcgtggtggtggacgtgagccacgaagaccctgaggtcaagttcaactggtacgtggacggcgtggaggtgcataatg
ccaagacaaagccgcgggaggagcagtacaacagcacgtaccgtgtggtcagcgtcctcaccgtcctgcaccaggactggct
gaatggcaaggagtacaagtgcaaggtctccaacaaagccctcccagcccccatcgagaaaaccatctccaaagccaaag
ggcagccccgagaaccacaggtgtacaccctgcccccatcccgggatgagctgaccaagaaccaggtcagcctgacctgcct
ggtcaaaggcttctatccaagcgacatcgccgtggagtgggagagcaatgggcagccggagaacaactacaagaccacgcc
tcccgtgctggactccgacggctccttcttcctctacagcaagctcaccgtggacaagagcaggtggcagcaggggaacgtcttc
tcatgctccgtgatgcatgaggctctgcacaaccactacacgcagaagagcctctccctgtctccgggtaaatga (SEQ ID NO: 170)
>HER018_Fc_Stop_Protein
APELLGGPSVFLFPPKPKDTLMISRTPEVTCVVVDVSHEDPEVKFNWYVDGVEVHNAKTKP
REEQYNSTYRVVSVLTVLHQDWLNGKEYKCKVSNKALPAPIEKTISKAKGQPREPQVYTLP
PSRDELTKNQVSLTCLVKGFYPSDIAVEWESNGQPENNYKTTPPVLDSDGSFFLYSKLTVD
KSRWQQGNVFSCSVMHEALHNHYTQKSLSLSPGK (SEQ ID NO: 171)
>HER026_CDS
atggaagcaccagcgcagcttctcttcctcctgctactctggctcccagataccaccggtgaggtgcagctggtgcagtctgggtct
gaggtgaggaggcctgggtcctcggtgagggtctcctgcacggcttctggagacacctccagcagctttaccgtcaactggctgc
gacaggcccctggacaaggtcttgagtggatgggagggatcacccctatgtttggcactgcaaactacgcacagatgttcgagg
acagagtcacgataaccgcggacgaaatggaactgagtggcctgacatctgaggacacggccgtgtatttttgtgcgacaggc
ccctccgattacgtttgggggagttatcgtttccttgacacctgggggcgggggaccacggtcaccgtctcgagtggaggcggcg
gttcaggcggaggtggctctggcggtggcggaagtgcacaggctgtgctgactcagccgtcctcagtgtctgcggccccaggac
aggaggtctccatctcctgctctggagccagatccaacgttgggggtaattatgtttcctggtaccaacacctcccaggaacagcc
cccaaactcctcatttatgacaataataagcgaccctcagggatgcctgaccgattctctggctccaagtctggcacgtcagccac
cctgggcatcaccggagtccagactgaggacgaggccgattattactgcgcaacatgggatagcagcctgagcgctgtggtctt
cggcggagggaccaagctgaccgtcctaggtgacgtacgcgagcccaaatcttctgacaaaactcacacatgcccaccgtgc
ccagcacctgaactcctgggtggaccgtcagtcttcctcttccccccaaaacccaaggacaccctcatgatctcccggacccctg
aggtcacatgcgtggtggtggacgtgagccacgaagaccctgaggtcaagttcaactggtacgtggacggcgtggaggtgcat
aatgccaagacaaagccgcgggaggagcagtacaacagcacgtaccgtgtggtcagcgtcctcaccgtcctgcaccaggac
tggctgaatggcaaggagtacaagtgcaaggtctccaacaaagccctcccagcccccatcgagaaaaccatctccaaagcca
aagggcagccccgagaaccacaggtgtacaccctgcccccatcccgggatgagctgaccaagaaccaggtcagcctgacct
gcctggtcaaaggcttctatccaagcgacatcgccgtggagtgggagagcaatgggcagccggagaacaactacaagacca
cgcctcccgtgctggactccgacggctccttcttcctctacagcaagctcaccgtggacaagagcaggtggcagcaggggaac
gtcttctcatgctccgtgatgcatgaggctctgcacaaccactacacgcagaagagcctctccctgtctccgggtaaatga (SEQ ID NO: 172)
>HER026_Protein_leader-stop
MEAPAQLLFLLLLWLPDTTGEVQLVQSGSEVRRPGSSVRVSCTASGDTSSSFTVNWLRQA
PGQGLEWMGGITPMFGTANYAQMFEDRVTITADEMELSGLTSEDTAVYFCATGPSDYVW
GSYRFLDTWGRGTTVTVSSGGGGSGGGGSGGGGSAQAVLTQPSSVSAAPGQEVSISCS
GARSNVGGNYVSWYQHLPGTAPKLLIYDNNKRPSGMPDRFSGSKSGTSATLGITGVQTED
EADYYCATWDSSLSAVVFGGGTKLTVLGDVREPKSSDKTHTCPPCPAPELLGGPSVFLFPP
KPKDTLMISRTPEVTCVVVDVSHEDPEVKFNWYVDGVEVHNAKTKPREEQYNSTYRVVSV
LTVLHQDWLNGKEYKCKVSNKALPAPIEKTISKAKGQPREPQVYTLPPSRDELTKNQVSLTC
LVKGFYPSDIAVEWESNGQPENNYKTTPPVLDSDGSFFLYSKLTVDKSRWQQGNVFSCSV
MHEALHNHYTQKSLSLSPGK (SEQ ID NO: 173)
>HER027_CDS
atggaagcaccagcgcagcttctcttcctcctgctactctggctcccagataccaccggtcaggtgcagctggtgcagtctgggtct
gaggtgaggaggcctgggtcctcggtgaggatctcctgcacggcttctggagacacctccagcagctttaccgtcaactgggtgc
gacaggcccctggacaaggtcttgagtggatgggagggatcacccctatgtttggcactgcaaactacgcacaggtgttcgagg
acagagtcacaataatcgcggacgagatggaactgagtggcctgacatctgaggacacggccgtgtatttctgtgcgacaggc
ccctccgattacgtttgggggagttatcgtttccttgacaactggggcaggggcaccctggtcaccgtctcgagtggaggcggcgg
ttcaggcggaggtggctctggcggtggcggaagtgcacagtctgtgctgactcagccaccctcagtgtctgcggccccagggca
gaaggtcaccatctcctgctctggaggcaggtccagcattgggaataattatgtgtcctggtatcaacacctcccaggaacagcc
cccaaactcctcatctatgacaataatcagcgaccctcagggattcctgaccgattctctggctccaagtctggcacgtcagccac
cctgggcatcaccggactccagactggggacgaggccgattattactgcggaacatgggatagcagcctgagtgctgtggtgttt
ggcggagggaccaaggtcaccgtcctaggtgacgtacgcgagcccaaatcttctgacaaaactcacacatgcccaccgtgcc
cagcacctgaactcctgggtggaccgtcagtcttcctcttccccccaaaacccaaggacaccctcatgatctcccggacccctga
ggtcacatgcgtggtggtggacgtgagccacgaagaccctgaggtcaagttcaactggtacgtggacggcgtggaggtgcata
atgccaagacaaagccgcgggaggagcagtacaacagcacgtaccgtgtggtcagcgtcctcaccgtcctgcaccaggact
ggctgaatggcaaggagtacaagtgcaaggtctccaacaaagccctcccagcccccatcgagaaaaccatctccaaagcca
aagggcagccccgagaaccacaggtgtacaccctgcccccatcccgggatgagctgaccaagaaccaggtcagcctgacct
gcctggtcaaaggcttctatccaagcgacatcgccgtggagtgggagagcaatgggcagccggagaacaactacaagacca
cgcctcccgtgctggactccgacggctccttcttcctctacagcaagctcaccgtggacaagagcaggtggcagcaggggaac
gtcttctcatgctccgtgatgcatgaggctctgcacaaccactacacgcagaagagcctctccctgtctccgggtaaatga (SEQ ID NO: 174)
>HER027_Protein_leader-stop
MEAPAQLLFLLLLWLPDTTGQVQLVQSGSEVRRPGSSVRISCTASGDTSSSFTVNWVRQA
PGQGLEWMGGITPMFGTANYAQVFEDRVTIIADEMELSGLTSEDTAVYFCATGPSDYVWG
SYRFLDNWGRGTLVTVSSGGGGSGGGGSGGGGSAQSVLTQPPSVSAAPGQKVTISCSG
GRSSIGNNYVSWYQHLPGTAPKLLIYDNNQRPSGIPDRFSGSKSGTSATLGITGLQTGDEA
DYYCGTWDSSLSAVVFGGGTKVTVLGDVREPKSSDKTHTCPPCPAPELLGGPSVFLFPPK
PKDTLMISRTPEVTCVVVDVSHEDPEVKFNWYVDGVEVHNAKTKPREEQYNSTYRVVSVL
TVLHQDWLNGKEYKCKVSNKALPAPIEKTISKAKGQPREPQVYTLPPSRDELTKNQVSLTCL
VKGFYPSDIAVEWESNGQPENNYKTTPPVLDSDGSFFLYSKLTVDKSRWQQGNVFSCSVM
HEALHNHYTQKSLSLSPGK (SEQ ID NO: 175)
>HER028_CDS
atggaagcaccagcgcagcttctcttcctcctgctactctggctcccagataccaccggtgaagtgcagctggtgcagtctggggc
tgaggtgaagaagcctggggcctcagtgaaggtctcctgcaaggcttctgggtacagcttcaccgccttctatattcactgggtgcg
acaggcccctggacaaggccttgagtatttgggatggatcgaccctaatactggtgccacaaaatatgcacagcgctttcagggc
agggtcatcatgacctgggacacgtccatcaccacagccaccatggaactgagcaggctgacgtctgacgactcggccgtcta
ctactgtgtgagagatttgcgggagtggggctacgaattgtccgttgagtattggggcagaggaaccctggtcaccgtctcgagtg
gaggcggcggttcaggcggaggtggctctggcggtggcggaagtgcacagtctgtgctgactcagccaccctcagcgtctggg
acccccgggcagagggtcaccatctcttgttctggaagcagctccaacatcggaagtaattatgtatactggtaccagcagctcc
caggaacggcccccaaactcctcatctataggaataatcagcggccctcaggggtccctgaccgattctctggctccaagtctgg
cacctcagcctccctggccatcagtgggctccggtccgaggatgaggctgattattactgtgcagcatgggatgacagcctgagt
ggttgggtgttcggcggagggaccaagctgaccgtcctaggtgacgtacgcgagcccaaatcttctgacaaaactcacacatgc
ccaccgtgcccagcacctgaactcctgggtggaccgtcagtcttcctcttccccccaaaacccaaggacaccctcatgatctccc
ggacccctgaggtcacatgcgtggtggtggacgtgagccacgaagaccctgaggtcaagttcaactggtacgtggacggcgtg
gaggtgcataatgccaagacaaagccgcgggaggagcagtacaacagcacgtaccgtgtggtcagcgtcctcaccgtcctgc
accaggactggctgaatggcaaggagtacaagtgcaaggtctccaacaaagccctcccagcccccatcgagaaaaccatctc
caaagccaaagggcagccccgagaaccacaggtgtacaccctgcccccatcccgggatgagctgaccaagaaccaggtca
gcctgacctgcctggtcaaaggcttctatccaagcgacatcgccgtggagtgggagagcaatgggcagccggagaacaacta
caagaccacgcctcccgtgctggactccgacggctccttcttcctctacagcaagctcaccgtggacaagagcaggtggcagc
aggggaacgtcttctcatgctccgtgatgcatgaggctctgcacaaccactacacgcagaagagcctctccctgtctccgggtaa
atga (SEQ ID NO: 176)
>HER028_Protein_leader-stop
MEAPAQLLFLLLLWLPDTTGEVQLVQSGAEVKKPGASVKVSCKASGYSFTAFYIHWVRQAP
GQGLEYLGWIDPNTGATKYAQRFQGRVIMTWDTSITTATMELSRLTSDDSAVYYCVRDLRE
WGYELSVEYWGRGTLVTVSSGGGGSGGGGSGGGGSAQSVLTQPPSASGTPGQRVTISC
SGSSSNIGSNYVYWYQQLPGTAPKLLIYRNNQRPSGVPDRFSGSKSGTSASLAISGLRSED
EADYYCAAWDDSLSGWVFGGGTKLTVLGDVREPKSSDKTHTCPPCPAPELLGGPSVFLFP
PKPKDTLMISRTPEVTCVVVDVSHEDPEVKFNWYVDGVEVHNAKTKPREEQYNSTYRVVS
VLTVLHQDWLNGKEYKCKVSNKALPAPIEKTISKAKGQPREPQVYTLPPSRDELTKNQVSLT
CLVKGFYPSDIAVEWESNGQPENNYKTTPPVLDSDGSFFLYSKLTVDKSRWQQGNVFSCS
VMHEALHNHYTQKSLSLSPGK (SEQ ID NO: 177)
>HER029_CDS
atggaagcaccagcgcagcttctcttcctcctgctactctggctcccagataccaccggtgaggtgcagctggtgcagtctggggc
tgaggtgaagaagcctggggcctcagtgaaggtctcctgcaaggcttctggatacaccttcaccggctactatatgcactgggtgc
gacaggcccctggacaagggcttgagtggatgggatggatcaaccctaacagtggtggcacaaactatgcacagaagtttcag
ggctgggtcaccatgaccagggacacgtccatcagcacagcctacatggagctgagcaggctgagatctgacgacacggcc
gtgtattactgtgcgagagattctactatggccccaggtgcttttgatatctggggccgaggcaccctggtcaccgtctcgagtgga
ggcggcggttcaggcggaggtggctctggcggtggcggaagtgcacagtctgtgctgactcagccaccctcggtgtcagtggcc
ccaggacagacggccaggatgacctgtgggggaaacaacattgaaagtaaaactgtgcattggtaccagcagaagccgggc
caggcccctgtgctggtcgtctacaatgataacgtccggccctcagggatccctgcgcgattctctggctccaactccggcaacac
ggccaccctgaccatcaacagggtcgaagccggggatgaggccgactattattgtcaggtgtgggactccagtagagatcaag
gggtattcggcggagggaccaagctgaccgtcctaggtgacgtacgcgagcccaaatcttctgacaaaactcacacatgccca
ccgtgcccagcacctgaactcctgggtggaccgtcagtcttcctcttccccccaaaacccaaggacaccctcatgatctcccgga
cccctgaggtcacatgcgtggtggtggacgtgagccacgaagaccctgaggtcaagttcaactggtacgtggacggcgtggag
gtgcataatgccaagacaaagccgcgggaggagcagtacaacagcacgtaccgtgtggtcagcgtcctcaccgtcctgcacc
aggactggctgaatggcaaggagtacaagtgcaaggtctccaacaaagccctcccagcccccatcgagaaaaccatctcca
aagccaaagggcagccccgagaaccacaggtgtacaccctgcccccatcccgggatgagctgaccaagaaccaggtcagc
ctgacctgcctggtcaaaggcttctatccaagcgacatcgccgtggagtgggagagcaatgggcagccggagaacaactaca
agaccacgcctcccgtgctggactccgacggctccttcttcctctacagcaagctcaccgtggacaagagcaggtggcagcag
gggaacgtcttctcatgctccgtgatgcatgaggctctgcacaaccactacacgcagaagagcctctccctgtctccggg
taaatga (SEQ ID NO: 178)
>HER029_Protein_leader-stop
MEAPAQLLFLLLLWLPDTTGEVQLVQSGAEVKKPGASVKVSCKASGYTFTGYYMHWVRQA
PGQGLEWMGWINPNSGGTNYAQKFQGWVTMTRDTSISTAYMELSRLRSDDTAVYYCARD
STMAPGAFDIWGRGTLVTVSSGGGGSGGGGSGGGGSAQSVLTQPPSVSVAPGQTARMT
CGGNNIESKTVHWYQQKPGQAPVLVVYNDNVRPSGIPARFSGSNSGNTATLTINRVEAGD
EADYYCQVWDSSRDQGVFGGGTKLTVLGDVREPKSSDKTHTCPPCPAPELLGGPSVFLFP
PKPKDTLMISRTPEVTCVVVDVSHEDPEVKFNWYVDGVEVHNAKTKPREEQYNSTYRVVS
VLTVLHQDWLNGKEYKCKVSNKALPAPIEKTISKAKGQPREPQVYTLPPSRDELTKNQVSLT
CLVKGFYPSDIAVEWESNGQPENNYKTTPPVLDSDGSFFLYSKLTVDKSRWQQGNVFSCS
VMHEALHNHYTQKSLSLSPGK (SEQ ID NO: 179)
>HER030_CDS
atggaagcaccagcgcagcttctcttcctcctgctactctggctcccagataccaccggtgaggtgcagctggtgcagtctggggg
aggcttggtcaggcctggagggtccctgagactctcctgtgcagcctcgggattctccttcagtgactactacatgacctggatccg
ccagattccagggaaggggctggagtgggtggcagttatatggaatgatggaagtgatagatactatgcagactccgtgaagg
gccgattcaccatttccagagacaattccaagaacacgctgtttctgcaaatgagcagcctgagagacgaggacacggctctat
attactgtgtgagagggggaccaacagcttcaagcggatttgactactggggccgaggcaccctggtcaccgtctcgagtggtg
gaggcggttcaggcggaggtggcagcggcggtggcggatcgtctgagctgactcagcctgcctccgtgtctgggtctcctggac
agtcgatcaccatctcctgcactggaaccagcagtgacgttggtggttataactatgtctcctggtacctacaacacccaggcaaa
gcccccaaactcatgatttatgagggcagtaagcggccctcaggggtttctaatcgcttctctggctccaagtctggcaacacggc
ctccctgacaatctctgggctccaggctgaggacgaggctgattattactgcagctcatatacaaccaggagcactcgagttttcg
gcggagggaccaagctgaccgtcctaggtgacgtacgcgagcccaaatcttctgacaaaactcacacatgcccaccgtgccc
agcacctgaactcctgggtggaccgtcagtcttcctcttccccccaaaacccaaggacaccctcatgatctcccggacccctgag
gtcacatgcgtggtggtggacgtgagccacgaagaccctgaggtcaagttcaactggtacgtggacggcgtggaggtgcataat
gccaagacaaagccgcgggaggagcagtacaacagcacgtaccgtgtggtcagcgtcctcaccgtcctgcaccaggactgg
ctgaatggcaaggagtacaagtgcaaggtctccaacaaagccctcccagcccccatcgagaaaaccatctccaaagccaaa
gggcagccccgagaaccacaggtgtacaccctgcccccatcccgggatgagctgaccaagaaccaggtcagcctgacctgc
ctggtcaaaggcttctatccaagcgacatcgccgtggagtgggagagcaatgggcagccggagaacaactacaagaccacg
cctcccgtgctggactccgacggctccttcttcctctacagcaagctcaccgtggacaagagcaggtggcagcaggggaacgtc
ttctcatgctccgtgatgcatgaggctctgcacaaccactacacgcagaagagcctctccctgtctccgggtaaatga (SEQ ID NO: 180)
>HER030_Protein_leader-stop
MEAPAQLLFLLLLWLPDTTGEVQLVQSGGGLVRPGGSLRLSCAASGFSFSDYYMTWIRQIP
GKGLEWVAVIWNDGSDRYYADSVKGRFTISRDNSKNTLFLQMSSLRDEDTALYYCVRGGP
TASSGFDYWGRGTLVTVSSGGGGSGGGGSGGGGSSELTQPASVSGSPGQSITISCTGTS
SDVGGYNYVSWYLQHPGKAPKLMIYEGSKRPSGVSNRFSGSKSGNTASLTISGLQAEDEA
DYYCSSYTTRSTRVFGGGTKLTVLGDVREPKSSDKTHTCPPCPAPELLGGPSVFLFPPKPK
DTLMISRTPEVTCVVVDVSHEDPEVKFNWYVDGVEVHNAKTKPREEQYNSTYRVVSVLTVL
HQDWLNGKEYKCKVSNKALPAPIEKTISKAKGQPREPQVYTLPPSRDELTKNQVSLTCLVK
GFYPSDIAVEWESNGQPENNYKTTPPVLDSDGSFFLYSKLTVDKSRWQQGNVFSCSVMHE
ALHNHYTQKSLSLSPGK (SEQ ID NO: 181)
>HER031_CDS
atggaagcaccagcgcagcttctcttcctcctgctactctggctcccagataccaccggtcaggtgcagctgcaggagtcgggtc
caggactggtgaagccctcgcagaccttgtcactcacctgtggcatctccggggacagtgtctctagcaacagtgctgcttggaa
ctggatcaggcagtccccaacgagaggccttgagtggctgggaaggacatattacaggtccagttggtatcataactatgcacct
tctatgaacagtcgattaaccatcatcgcagacacatccaaaaaccagttctctttgcaactgaactctgtgactcccgaggacac
ggctgtatattactgtgcaagcgggtgggcctttgatgtctggggcaggggaaccctggtcaccgtctcgagtggaggcggcggtt
caggcggaggtggctctggcggtggcggaagtgcacagtctgtgctgactcagccaccctccgcgtccgggtctcctggacagt
cagtcaccatctcctgcactggaaccagcagtgacgttggtgcttatgactttgtctcctggtaccaacagcaccctggcaaagcc
cccaaactcatgatttatgaggtcaataagcggccctcaggggtccctgatcgcttctctggctccaagtctggcaacacggcctc
cctgaccgtctctgggctccaggctgaggatgaggctgattattactgcagctcatatgcaggcagcaagaatttgcttttcggcgg
agggaccaagctgaccgtcctaggtgacgtacgcgagcccaaatcttctgacaaaactcacacatgcccaccgtgcccagca
cctgaactcctgggtggaccgtcagtcttcctcttccccccaaaacccaaggacaccctcatgatctcccggacccctgaggtca
catgcgtggtggtggacgtgagccacgaagaccctgaggtcaagttcaactggtacgtggacggcgtggaggtgcataatgcc
aagacaaagccgcgggaggagcagtacaacagcacgtaccgtgtggtcagcgtcctcaccgtcctgcaccaggactggctg
aatggcaaggagtacaagtgcaaggtctccaacaaagccctcccagcccccatcgagaaaaccatctccaaagccaaagg
gcagccccgagaaccacaggtgtacaccctgcccccatcccgggatgagctgaccaagaaccaggtcagcctgacctgcctg
gtcaaaggcttctatccaagcgacatcgccgtggagtgggagagcaatgggcagccggagaacaactacaagaccacgcct
cccgtgctggactccgacggctccttcttcctctacagcaagctcaccgtggacaagagcaggtggcagcaggggaacgtcttct
catgctccgtgatgcatgaggctctgcacaaccactacacgcagaagagcctctccctgtctccgggtaaatga (SEQ ID NO: 182)
>HER031_Protein_leader-stop
MEAPAQLLFLLLLWLPDTTGQVQLQESGPGLVKPSQTLSLTCGISGDSVSSNSAAWNWIRQ
SPTRGLEWLGRTYYRSSWYHNYAPSMNSRLTIIADTSKNQFSLQLNSVTPEDTAVYYCASG
WAFDVWGRGTLVTVSSGGGGSGGGGSGGGGSAQSVLTQPPSASGSPGQSVTISCTGTS
SDVGAYDFVSWYQQHPGKAPKLMIYEVNKRPSGVPDRFSGSKSGNTASLTVSGLQAEDEA
DYYCSSYAGSKNLLFGGGTKLTVLGDVREPKSSDKTHTCPPCPAPELLGGPSVFLFPPKPK
DTLMISRTPEVTCVVVDVSHEDPEVKFNWYVDGVEVHNAKTKPREEQYNSTYRVVSVLTVL
HQDWLNGKEYKCKVSNKALPAPIEKTISKAKGQPREPQVYTLPPSRDELTKNQVSLTCLVK
GFYPSDIAVEWESNGQPENNYKTTPPVLDSDGSFFLYSKLTVDKSRWQQGNVFSCSVMHE
ALHNHYTQKSLSLSPGK (SEQ ID NO: 183)
>HER032_CDS
atggaagcaccagcgcagcttctcttcctcctgctactctggctcccagataccaccggtgaggtgcagctgttggagtctggggg
aggcttggtacagcctggggggtccctgagactctcctgtgcagcctctggattcacctttagcagctatgccatgagctgggtccg
ccaggctccagggaaggggctggagtgggtctcagctattagtggtagtggtggtagcacatactacgcagactccgtgaaggg
ccggttcaccatctccagagacaattccaagaacacgctgtatctgcaaatgaacagcctgagagccgaggacacggccgtgt
attactgtgcgagaggatacagtggctacgatgaccctgactcctgggggagagggaccacggtcaccgtctcgagtggaggc
ggcggttcaggcggaggtggctctggcggtggcggaagtgcacacgttatactgactcaaccgccctcaacgtctgggacccc
cgggcagacggtcaccatctcttgttctgggagcagctccaacatcggaagtcattatgtatactggtaccagcagctcccagga
acggcccccaaactcctcatctataggaataatcagcggccctcaggggtccctgaccgattctctggctccaagtctggcacctc
agcctccctggccatcagtgggctccggtccgaggatgagactgattattactgtgcagcatgggatgacagcctgagtggtcga
gtcttcggaactgggaccaagctgaccgtcctaggtgacgtacgcgagcccaaatcttctgacaaaactcacacatgcccaccg
tgcccagcacctgaactcctgggtggaccgtcagtcttcctcttccccccaaaacccaaggacaccctcatgatctcccggaccc
ctgaggtcacatgcgtggtggtggacgtgagccacgaagaccctgaggtcaagttcaactggtacgtggacggcgtggaggtg
cataatgccaagacaaagccgcgggaggagcagtacaacagcacgtaccgtgtggtcagcgtcctcaccgtcctgcaccag
gactggctgaatggcaaggagtacaagtgcaaggtctccaacaaagccctcccagcccccatcgagaaaaccatctccaaa
gccaaagggcagccccgagaaccacaggtgtacaccctgcccccatcccgggatgagctgaccaagaaccaggtcagcct
gacctgcctggtcaaaggcttctatccaagcgacatcgccgtggagtgggagagcaatgggcagccggagaacaactacaa
gaccacgcctcccgtgctggactccgacggctccttcttcctctacagcaagctcaccgtggacaagagcaggtggcagcagg
ggaacgtcttctcatgctccgtgatgcatgaggctctgcacaaccactacacgcagaagagcctctccctgtctccgggtaaatga (SEQ ID NO: 184)
>HER032_Protein_leader-stop
MEAPAQLLFLLLLWLPDTTGEVQLLESGGGLVQPGGSLRLSCAASGFTFSSYAMSWVRQA
PGKGLEWVSAISGSGGSTYYADSVKGRFTISRDNSKNTLYLQMNSLRAEDTAVYYCARGY
SGYDDPDSWGRGTTVTVSSGGGGSGGGGSGGGGSAHVILTQPPSTSGTPGQTVTISCSG
SSSNIGSHYVYWYQQLPGTAPKLLIYRNNQRPSGVPDRFSGSKSGTSASLAISGLRSEDET
DYYCAAWDDSLSGRVFGTGTKLTVLGDVREPKSSDKTHTCPPCPAPELLGGPSVFLFPPK
PKDTLMISRTPEVTCVVVDVSHEDPEVKFNWYVDGVEVHNAKTKPREEQYNSTYRVVSVL
TVLHQDWLNGKEYKCKVSNKALPAPIEKTISKAKGQPREPQVYTLPPSRDELTKNQVSLTCL
VKGFYPSDIAVEWESNGQPENNYKTTPPVLDSDGSFFLYSKLTVDKSRWQQGNVFSCSVM
HEALHNHYTQKSLSLSPGK (SEQ ID NO: 185)
>HER033_CDS
atggaagcaccagcgcagcttctcttcctcctgctactctggctcccagataccaccggtcaggtacagctgcagcagtcagggg
ctgaggtgaagaagcctgggtcctcggtgaaggtctcctgcaaggcttctggaggcaccatcagcaactatgctatcagttgggt
gcggctggcccctggacaaggtcttgagtggatgggaagtatcgtccctcttcatgggacaacaaacttcgcacagaaattccag
ggcagagtcacgatcaccgcggacgagtccacgagcacatcctacatggaggtgaacgtcctgacatatgaagacacggcg
atgtattattgtgcgtctctcaattggggctactggggccggggcaccctggtcaccgtctcgagtggaggcggcggttcaggcgg
aggtggctctggcggtggcggaagtgcacttaattttatgctgactcagccccactctgtgtcggagtctccggggaagacggtaa
ccatctcctgcaccggcagtagtggcagcattgccagcaactatgtgcagtggtaccagcagcgcccggacagtgcccccacc
actgtgatctatgaggataatcgaagatcctctggagtccctgatcggttctctggctccatcgacagctcctccaactctgcctccct
cagcatctctggactgaagactgaggacgaggctgactactactgtcagtcctatgatagtagcggtcatgtggtcttcggcggag
ggaccaagctgaccgtcctaggtgacgtacgcgagcccaaatcttctgacaaaactcacacatgcccaccgtgcccagcacct
gaactcctgggtggaccgtcagtcttcctcttccccccaaaacccaaggacaccctcatgatctcccggacccctgaggtcacat
gcgtggtggtggacgtgagccacgaagaccctgaggtcaagttcaactggtacgtggacggcgtggaggtgcataatgccaag
acaaagccgcgggaggagcagtacaacagcacgtaccgtgtggtcagcgtcctcaccgtcctgcaccaggactggctgaatg
gcaaggagtacaagtgcaaggtctccaacaaagccctcccagcccccatcgagaaaaccatctccaaagccaaagggcag
ccccgagaaccacaggtgtacaccctgcccccatcccgggatgagctgaccaagaaccaggtcagcctgacctgcctggtca
aaggcttctatccaagcgacatcgccgtggagtgggagagcaatgggcagccggagaacaactacaagaccacgcctcccg
tgctggactccgacggctccttcttcctctacagcaagctcaccgtggacaagagcaggtggcagcaggggaacgtottctcatg
ctccgtgatgcatgaggctctgcacaaccactacacgcagaagagcctctccctgtctccgggtaaatga (SEQ ID NO: 186)
>HER033_Protein_leader-stop
MEAPAQLLFLLLLWLPDTTGQVQLQQSGAEVKKPGSSVKVSCKASGGTISNYAISWVRLAP
GQGLEWMGSIVPLHGTTNFAQKFQGRVTITADESTSTSYMEVNVLTYEDTAMYYCASLNW
GYWGRGTLVTVSSGGGGSGGGGSGGGGSALNFMLTQPHSVSESPGKTVTISCTGSSGSI
ASNYVQWYQQRPDSAPTTVIYEDNRRSSGVPDRFSGSIDSSSNSASLSISGLKTEDEADYY
CQSYDSSGHVVFGGGTKLTVLGDVREPKSSDKTHTCPPCPAPELLGGPSVFLFPPKPKDTL
MISRTPEVTCVVVDVSHEDPEVKFNWYVDGVEVHNAKTKPREEQYNSTYRVVSVLTVLHQ
DWLNGKEYKCKVSNKALPAPIEKTISKAKGQPREPQVYTLPPSRDELTKNQVSLTCLVKGF
YPSDIAVEWESNGQPENNYKTTPPVLDSDGSFFLYSKLTVDKSRWQQGNVFSCSVMHEAL
HNHYTQKSLSLSPGK SEQ ID NO: 187)
>HER034_CDS
atggaagcaccagcgcagcttctcttcctcctgctactctggctcccagataccaccggtgaggtgcagctggtgcagtctggggc
agaggtgaaaaagcccggggagtctctgaagatctcctgtaagggttttggatacaattttcgcagcgcctggatcggctgggtgc
gccagatgcccggcaaaggcctggagtggatgggggtcatctatcctggtgactctgatgtcagatacagtccgtccttccaagg
ccaggtcaccatctcagccgacaagtccatcagtaccgcctacctgcagtggagcagcctgaaagcctcggacaccgccatgt
attattgtacgagacccgtagggcagtgggtggactctgactattggggcaagggaaccctggtcaccgtctcgagtggaggcg
gcggttcaggcggaggtggctctggcggtggcggaagtgcacagtctgtgttgacgcagccgccctcagcgtctgggaccccc
ggacagagggtcaccatctcttgttctggaagcagctccaacatcggaactaatactgtgaactggtaccagcagcttccaggaa
cggcccccaaactcctcatctatactagtaatcagcggccctcaggggtccctgcccgcttctctgcctccaactctggcacctcag
cctccctggccatcagtgggctccggtccgaggatgaggctgattattattgtgcagcgtgggatgacaagttgagtggtgcggtgt
tcggcggagggaccaagctgaccgtcctaggtgacgtacgcgagcccaaatcttctgacaaaactcacacatgcccaccgtgc
ccagcacctgaactcctgggtggaccgtcagtcttcctcttccccccaaaacccaaggacaccctcatgatctcccggacccctg
aggtcacatgcgtggtggtggacgtgagccacgaagaccctgaggtcaagttcaactggtacgtggacggcgtggaggtgcat
aatgccaagacaaagccgcgggaggagcagtacaacagcacgtaccgtgtggtcagcgtcctcaccgtcctgcaccaggac
tggctgaatggcaaggagtacaagtgcaaggtctccaacaaagccctcccagcccccatcgagaaaaccatctccaaagcca
aagggcagccccgagaaccacaggtgtacaccctgcccccatcccgggatgagctgaccaagaaccaggtcagcctgacct
gcctggtcaaaggcttctatccaagcgacatcgccgtggagtgggagagcaatgggcagccggagaacaactacaagacca
cgcctcccgtgctggactccgacggctccttcttcctctacagcaagctcaccgtggacaagagcaggtggcagcaggggaac
gtcttctcatgctccgtgatgcatgaggctctgcacaaccactacacgcagaagagcctctccctgtctccgggtaaatga (SEQ ID NO: 188)
>HER034_Protein_leader-stop
MEAPAQLLFLLLLWLPDTTGEVQLVQSGAEVKKPGESLKISCKGFGYNFRSAWIGWVRQM
PGKGLEWMGVIYPGDSDVRYSPSFQGQVTISADKSISTAYLQWSSLKASDTAMYYCTRPV
GQWVDSDYWGKGTLVTVSSGGGGSGGGGSGGGGSAQSVLTQPPSASGTPGQRVTISCS
GSSSNIGTNTVNWYQQLPGTAPKLLIYTSNQRPSGVPARFSASNSGTSASLAISGLRSEDE
ADYYCAAWDDKLSGAVFGGGTKLTVLGDVREPKSSDKTHTCPPCPAPELLGGPSVFLFPP
KPKDTLMISRTPEVTCVVVDVSHEDPEVKFNWYVDGVEVHNAKTKPREEQYNSTYRVVSV
LTVLHQDWLNGKEYKCKVSNKALPAPIEKTISKAKGQPREPQVYTLPPSRDELTKNQVSLTC
LVKGFYPSDIAVEWESNGQPENNYKTTPPVLDSDGSFFLYSKLTVDKSRWQQGNVFSCSV
MHEALHNHYTQKSLSLSPGK (SEQ ID NO: 189)
>HER035_CDS
atggaagcaccagcgcagcttctcttcctcctgctactctggctcccagataccaccggtgaggtgcagctgttggagtctggggg
aggcttggtacagcctggggggtccctgagactctcctgtgcagcctctggattcacctttagcagctatgccatgagctgggtccg
ccaggctccagggaaggggctggagtgggtctcagctattagtggtagtggtggtagcacatactacgcagactccgtgaaggg
ccggttcaccatctccagagacaattccaagaacacgctgtatctgcaaatgaacagcctgagagccgaggacacggccgtgt
attactgtgcgagacagtcgggcgcggactggtacttcgatctctggggccgaggcaccctggtcaccgtctcgagtggaggcg
gcggttcaggcggaggtggctctggcggtggcggaagtgcacaggctgtgctgactcagccgtccgcagtttctggggccccag
ggcagagggtcaccatctcctgcactgggaccagctccaacatcgggacaaactatcttgtacactggtatcagcaacgtccag
gaacagccccccaactcctcgtctctggtaacaacactcgaccctctggggtcactgaccggttctctgtctccaagtctgccactt
cagcctccctggccatcactgggctccaggctgaggatgaggctgattattactgccagacctatgacatcaacttgagggtttgg
gtgttcggcggagggaccaaggtcaccgtcctaggtgacgtacgcgagcccaaatcttctgacaaaactcacacatgcccacc
gtgcccagcacctgaactcctgggtggaccgtcagtcttcctcttccccccaaaacccaaggacaccctcatgatctcccggacc
cctgaggtcacatgcgtggtggtggacgtgagccacgaagaccctgaggtcaagttcaactggtacgtggacggcgtggaggt
gcataatgccaagacaaagccgcgggaggagcagtacaacagcacgtaccgtgtggtcagcgtcctcaccgtcctgcacca
ggactggctgaatggcaaggagtacaagtgcaaggtctccaacaaagccctcccagcccccatcgagaaaaccatctccaa
agccaaagggcagccccgagaaccacaggtgtacaccctgcccccatcccgggatgagctgaccaagaaccaggtcagcc
tgacctgcctggtcaaaggcttctatccaagcgacatcgccgtggagtgggagagcaatgggcagccggagaacaactacaa
gaccacgcctcccgtgctggactccgacggctccttcttcctctacagcaagctcaccgtggacaagagcaggtggcagcagg
ggaacgtcttctcatgctccgtgatgcatgaggctctgcacaaccactacacgcagaagagcctctccctgtctccgggtaaatga (SEQ ID NO: 190)
>HER035_Protein_leader-stop
MEAPAQLLFLLLLWLPDTTGEVQLLESGGGLVQPGGSLRLSCAASGFTFSSYAMSWVRQA
PGKGLEWVSAISGSGGSTYYADSVKGRFTISRDNSKNTLYLQMNSLRAEDTAVYYCARQS
GADWYFDLWGRGTLVTVSSGGGGSGGGGSGGGGSAQAVLTQPSAVSGAPGQRVTISCT
GTSSNIGTNYLVHWYQQRPGTAPQLLVSGNNTRPSGVTDRFSVSKSATSASLAITGLQAED
EADYYCQTYDINLRVWVFGGGTKVTVLGDVREPKSSDKTHTCPPCPAPELLGGPSVFLFPP
KPKDTLMISRTPEVTCVVVDVSHEDPEVKFNWYVDGVEVHNAKTKPREEQYNSTYRVVSV
LTVLHQDWLNGKEYKCKVSNKALPAPIEKTISKAKGQPREPQVYTLPPSRDELTKNQVSLTC
LVKGFYPSDIAVEWESNGQPENNYKTTPPVLDSDGSFFLYSKLTVDKSRWQQGNVFSCSV
MHEALHNHYTQKSLSLSPGK (SEQ ID NO: 191)
>HER036_CDS
atggaagcaccagcgcagcttctcttcctcctgctactctggctcccagataccaccggtgaggtgcagctggtggagactgggg
gaggcgtggtccagcctggggggtccctgagcctctcctgtgcagcgtctggattcaccttcagtagctatggcatgcagtgggtc
cgccaggctccaggcaaggggctggagtgggtggcgtttatacggtacgatggaagtagtgaatactatgcagactccgtgaa
gggccgattcaccatctccagagacaattccaagaacacgctgtatctgcaaatgaacagcctgagagctgaggacacggctg
tgtattactgtggaagaacgctggagtctagtttgtggggcaagggaaccctggtcaccgtctcgagtggtggaggcggttcagg
cggaggtggcagcggcggtggcggatcgcagtctgtgttgacgcagccgccctcagtgtctgcggccccaggacagaaggtc
accatttcctgctctggaagcacctccaacattgggaataattatgtctcctggtaccaacagcacccaggcaaagcccccaaac
tcatgatttatgatgtcagtaagcggccctcaggggtccctgaccgattctctggctccaagtctggcaactcagcctccctggacat
cagtgggctccagtctgaggatgaggctgattattactgtgcagcatgggatgacagcctgagtgaatttctcttcggaactaggac
caagctgaccgtcctaggtgacgtacgcgagcccaaatcttctgacaaaactcacacatgcccaccgtgcccagcacctgaac
tcctgggtggaccgtcagtcttcctcttccccccaaaacccaaggacaccctcatgatctcccggacccctgaggtcacatgcgtg
gtggtggacgtgagccacgaagaccctgaggtcaagttcaactggtacgtggacggcgtggaggtgcataatgccaagacaa
agccgcgggaggagcagtacaacagcacgtaccgtgtggtcagcgtcctcaccgtcctgcaccaggactggctgaatggcaa
ggagtacaagtgcaaggtctccaacaaagccctcccagcccccatcgagaaaaccatctccaaagccaaagggcagcccc
gagaaccacaggtgtacaccctgcccccatcccgggatgagctgaccaagaaccaggtcagcctgacctgcctggtcaaagg
cttctatccaagcgacatcgccgtggagtgggagagcaatgggcagccggagaacaactacaagaccacgcctcccgtgctg
gactccgacggctccttcttcctctacagcaagctcaccgtggacaagagcaggtggcagcaggggaacgtcttctcatgctccg
tgatgcatgaggctctgcacaaccactacacgcagaagagcctctccctgtctccgggtaaatga (SEQ ID NO: 192)
>HER036_Protein_leader-stop
MEAPAQLLFLLLLWLPDTTGEVQLVETGGGVVQPGGSLSLSCAASGFTFSSYGMQWVRQA
PGKGLEWVAFIRYDGSSEYYADSVKGRFTISRDNSKNTLYLQMNSLRAEDTAVYYCGRTLE
SSLWGKGTLVTVSSGGGGSGGGGSGGGGSQSVLTQPPSVSAAPGQKVTISCSGSTSNIG
NNYVSWYQQHPGKAPKLMIYDVSKRPSGVPDRFSGSKSGNSASLDISGLQSEDEADYYCA
AWDDSLSEFLFGTRTKLTVLGDVREPKSSDKTHTCPPCPAPELLGGPSVFLFPPKPKDTLMI
SRTPEVTCVVVDVSHEDPEVKFNWYVDGVEVHNAKTKPREEQYNSTYRVVSVLTVLHQD
WLNGKEYKCKVSNKALPAPIEKTISKAKGQPREPQVYTLPPSRDELTKNQVSLTCLVKGFYP
SDIAVEWESNGQPENNYKTTPPVLDSDGSFFLYSKLTVDKSRWQQGNVFSCSVMHEALHN
HYTQKSLSLSPGK (SEQ ID NO: 193)
>HER037_CDS
atggaagcaccagcgcagcttctcttcctcctgctactctggctcccagataccaccggtcaggtgcagctggtgcagtctggagc
tgaggtgaagaagcctgggtcctcggtgaaggtctcctgcaaggcttctggttacacctttaccagctatggtatcagctgggtgcg
acaggcccctggacaagggcttgagtggatgggatggatcagcgcttacaatggtaacacaaactatgcacagaagctccag
ggcagagtcaccatgaccacagacacatccacgagcacagcctacatggagctgaggagcctgagatctgacgacacggc
cgtgtattactgtgcgagagtcccgggcgtaagtgggagctatccagactactactacatggacgtctggggcaagggaaccct
ggtcaccgtctcctcaggtggaggcggttcaggcggtggcagcggcggtggcggatcggacatccagatgacccagtctccttc
caccctgtctgcatctattggagacagagtcaccatcacctgccgggccagtgagggtatttatcactggttggcctggtatcagca
gaagccagggaaagctcctaaactcctgatctataaggcctctagtttagccagtggggccccatcaaggttcagcggcagtgg
atctgggacagatttcactctcaccatcagcagcctgcagcctgatgattttgcaacttattactgccaacaatatagtaattatccgc
tcactttcggcggagggaccaagctggagatcaaacgtgacgtacgcgagcccaaatcttctgacaaaactcacacatgccca
ccgtgcccagcacctgaactcctgggtggaccgtcagtcttcctcttccccccaaaacccaaggacaccctcatgatctcccgga
cccctgaggtcacatgcgtggtggtggacgtgagccacgaagaccctgaggtcaagttcaactggtacgtggacggcgtggag
gtgcataatgccaagacaaagccgcgggaggagcagtacaacagcacgtaccgtgtggtcagcgtcctcaccgtcctgcacc
aggactggctgaatggcaaggagtacaagtgcaaggtctccaacaaagccctcccagcccccatcgagaaaaccatctcca
aagccaaagggcagccccgagaaccacaggtgtacaccctgcccccatcccgggatgagctgaccaagaaccaggtcagc
ctgacctgcctggtcaaaggcttctatccaagcgacatcgccgtggagtgggagagcaatgggcagccggagaacaactaca
agaccacgcctcccgtgctggactccgacggctccttcttcctctacagcaagctcaccgtggacaagagcaggtggcagcag
gggaacgtcttctcatgctccgtgatgcatgaggctctgcacaaccactacacgcagaagagcctctccctgtctccggg
taaatga (SEQ ID NO: 194)
>HER037_Protein_leader-stop
MEAPAQLLFLLLLWLPDTTGQVQLVQSGAEVKKPGSSVKVSCKASGYTFTSYGISWVRQA
PGQGLEWMGWISAYNGNTNYAQKLQGRVTMTTDTSTSTAYMELRSLRSDDTAVYYCARV
PGVSGSYPDYYYMDVWGKGTLVTVSSGGGGSGGGSGGGGSDIQMTQSPSTLSASIGDRV
TITCRASEGIYHWLAWYQQKPGKAPKLLIYKASSLASGAPSRFSGSGSGTDFTLTISSLQPD
DFATYYCQQYSNYPLTFGGGTKLEIKRDVREPKSSDKTHTCPPCPAPELLGGPSVFLFPPK
PKDTLMISRTPEVTCVVVDVSHEDPEVKFNWYVDGVEVHNAKTKPREEQYNSTYRVVSVL
TVLHQDWLNGKEYKCKVSNKALPAPIEKTISKAKGQPREPQVYTLPPSRDELTKNQVSLTCL
VKGFYPSDIAVEWESNGQPENNYKTTPPVLDSDGSFFLYSKLTVDKSRWQQGNVFSCSVM
HEALHNHYTQKSLSLSPGK (SEQ ID NO: 195)
>HER038_CDS
atggaagcaccagcgcagcttctcttcctcctgctactctggctcccagataccaccggtgaggtgcagctgttggagtctggggg
aggcttggtacagcctggggggtccctgagactctcctgtgcagcctctggattcacctttagcagctatgccatgagctgggtccg
ccaggctccagggaaggggctggagtgggtctcagctattagtggtagtggtggtagcacatactacgcagactccgtgaaggg
ccggttcaccatctccagagacaattccaagaacacgctgtatctgcaaatgaacagcctgagagccgaggacacggccgtgt
attactgtgcgagatggaggcctcttctagactaccactttgaccaatggggccaagggacaatggtcaccgtctcgagtggagg
cggcggttcaggcggaggtggctctggcggtggcggaagtgcacagtctgtgctgactcagccaccctcagcgtctgggaccc
ccggacagacggtaacaatctcttgttctggaagcagctccaacatcggaagtagtgttgttaattggtaccagcagttcccagga
acggcccccaaagtcctcgtctatagtaacactcagcggccctcaggggtccctgaccgattctctggctccaggtctggcacctc
agcctccctggccatcagtgggctccagtctgaggatgaggctgattattactgtttagcatgggatgccagcctgaatggttgggt
gttcggcggagggaccaagctgaccgtcctaggtgacgtacgcgagcccaaatcttctgacaaaactcacacatgcccaccgt
gcccagcacctgaactcctgggtggaccgtcagtcttcctcttccccccaaaacccaaggacaccctcatgatctcccggacccc
tgaggtcacatgcgtggtggtggacgtgagccacgaagaccctgaggtcaagttcaactggtacgtggacggcgtggaggtgc
ataatgccaagacaaagccgcgggaggagcagtacaacagcacgtaccgtgtggtcagcgtcctcaccgtcctgcaccagg
actggctgaatggcaaggagtacaagtgcaaggtctccaacaaagccctcccagcccccatcgagaaaaccatctccaaagc
caaagggcagccccgagaaccacaggtgtacaccctgcccccatcccgggatgagctgaccaagaaccaggtcagcctga
cctgcctggtcaaaggcttctatccaagcgacatcgccgtggagtgggagagcaatgggcagccggagaacaactacaagac
cacgcctcccgtgctggactccgacggctccttcttcctctacagcaagctcaccgtggacaagagcaggtggcagcagggga
acgtcttctcatgctccgtgatgcatgaggctctgcacaaccactacacgcagaagagcctctccctgtctccgggtaaatga (SEQ ID NO: 196)
>HER038_Protein_leader-stop
MEAPAQLLFLLLLWLPDTTGEVQLLESGGGLVQPGGSLRLSCAASGFTFSSYAMSWVRQA
PGKGLEWVSAISGSGGSTYYADSVKGRFTISRDNSKNTLYLQMNSLRAEDTAVYYCARWR
PLLDYHFDQWGQGTMVTVSSGGGGSGGGGSGGGGSAQSVLTQPPSASGTPGQTVTISC
SGSSSNIGSSVVNWYQQFPGTAPKVLVYSNTQRPSGVPDRFSGSRSGTSASLAISGLQSE
DEADYYCLAWDASLNGWVFGGGTKLTVLGDVREPKSSDKTHTCPPCPAPELLGGPSVFLF
PPKPKDTLMISRTPEVTCVVVDVSHEDPEVKFNWYVDGVEVHNAKTKPREEQYNSTYRVV
SVLTVLHQDWLNGKEYKCKVSNKALPAPIEKTISKAKGQPREPQVYTLPPSRDELTKNQVSL
TCLVKGFYPSDIAVEWESNGQPENNYKTTPPVLDSDGSFFLYSKLTVDKSRWQQGNVFSC
SVMHEALHNHYTQKSLSLSPGK (SEQ ID NO: 197)
>HER039_CDS
atggaagcaccagcgcagcttctcttcctcctgctactctggctcccagataccaccggtgaggtgcagctggtggagactgggg
gaggcttggtacagcctggggggtccctgagactctcctgtgcagcctctggattcaccttcagtagctatggcatgaactgggtcc
gccaggctccagggaaggggctggagtgggtttcatacattagtagttctggtaataccatattctacgcagactctgtgaagggc
cgattcaccatctccagagacagtgccaagaattcagtgtctctgcagatgaacagcctgagagacgaggacacggctgtgtat
tactgtgcttcctactactcctactactacggtatggacgcctggggccaggggacaatggtcaccgtctcgagtggaggcggcg
gttcaggcggaggtggctctggcggtggcggaagtgcactttcctatgtgctgactcagccaccctcagcgtctgggacccccgg
gcagagggtcaccatctcttgttctggaagcagctccaacatcggaagtaatactgtaaactggtaccagcagctcccaggaac
ggcccccaaactcctcatctatagtaataatcagcggccctcaggggtccctgaccgattctctggctccaagtctggcacctcag
cctccctggccatcagtgggctgcggtccgaggatgaggctgattattactgtgcagcatgggattacagcctgagtggttgggtgt
tcggcggagggaccaaggtcaccgtcctaggtgacgtacgcgagcccaaatcttctgacaaaactcacacatgcccaccgtgc
ccagcacctgaactcctgggtggaccgtcagtcttcctcttccccccaaaacccaaggacaccctcatgatctcccggacccctg
aggtcacatgcgtggtggtggacgtgagccacgaagaccctgaggtcaagttcaactggtacgtggacggcgtggaggtgcat
aatgccaagacaaagccgcgggaggagcagtacaacagcacgtaccgtgtggtcagcgtcctcaccgtcctgcaccaggac
tggctgaatggcaaggagtacaagtgcaaggtctccaacaaagccctcccagcccccatcgagaaaaccatctccaaagcca
aagggcagccccgagaaccacaggtgtacaccctgcccccatcccgggatgagctgaccaagaaccaggtcagcctgacct
gcctggtcaaaggcttctatccaagcgacatcgccgtggagtgggagagcaatgggcagccggagaacaactacaagacca
cgcctcccgtgctggactccgacggctccttcttcctctacagcaagctcaccgtggacaagagcaggtggcagcaggggaac
gtcttctcatgctccgtgatgcatgaggctctgcacaaccactacacgcagaagagcctctccctgtctccgggtaaatga (SEQ ID NO: 198)
>HER039_Protein_leader-stop
MEAPAQLLFLLLLWLPDTTGEVQLVETGGGLVQPGGSLRLSCAASGFTFSSYGMNWVRQA
PGKGLEWVSYISSSGNTIFYADSVKGRFTISRDSAKNSVSLQMNSLRDEDTAVYYCASYYS
YYYGMDAWGQGTMVTVSSGGGGSGGGGSGGGGSALSYVLTQPPSASGTPGQRVTISCS
GSSSNIGSNTVNWYQQLPGTAPKLLIYSNNQRPSGVPDRFSGSKSGTSASLAISGLRSEDE
ADYYCAAWDYSLSGWVFGGGTKVTVLGDVREPKSSDKTHTCPPCPAPELLGGPSVFLFPP
KPKDTLMISRTPEVTCVVVDVSHEDPEVKFNWYVDGVEVHNAKTKPREEQYNSTYRVVSV
LTVLHQDWLNGKEYKCKVSNKALPAPIEKTISKAKGQPREPQVYTLPPSRDELTKNQVSLTC
LVKGFYPSDIAVEWESNGQPENNYKTTPPVLDSDGSFFLYSKLTVDKSRWQQGNVFSCSV
MHEALHNHYTQKSLSLSPGK (SEQ ID NO: 199)
>HER071_CDS
atggaagcaccagcgcagcttctcttcctcctgctactctggctcccagataccaccggtgaggtgcagctggtggagactgggg
aaggcctggtcaagcctggggggtccctgagactctcctgtacagcctctggattcaccttcaggagttatagcttgaactgggtcc
gccaggctccagggcaggggctggagtgggtctcatccattagtagtactagtacttacatatactacgcagactcggtgaaggg
ccgattcaccatctccagagacgacgccaagaacacactgtatctgcaaatgaacagcctgagagccgaagacacagctgc
atattactgtgttagactgggatctggtgggggatattttcctgactactggggcaggggcaccctggtcaccgtctcgagtggtgga
ggcggttcaggcggaggtggcagcggcggtggcggatcgtctgagctgactcaggaccctgctgtgtctgtggccttgggacag
acagtcaggatcacatgccaaggagacagcctcagaagctattatgcaagctggtaccagcagaagccaggacaggcccct
gtacttgtcatctatggtaaaaacaaccggccctcagggatcccagaccgattctctggctccagctcaggaaacacagcttcctt
gaccatcactggggctcaggcggaagatgaggctgactattactgtaactcccgggacagcagtggtaaccatgtggtattcgg
cggagggaccaagctgaccgtcctaggtgacgtacgcgagcccaaatcttctgacaaaactcacacatgcccaccgtgccca
gcacctgaactcctgggtggaccgtcagtcttcctcttccccccaaaacccaaggacaccctcatgatctcccggacccctgagg
tcacatgcgtggtggtggacgtgagccacgaagaccctgaggtcaagttcaactggtacgtggacggcgtggaggtgcataatg
ccaagacaaagccgcgggaggagcagtacaacagcacgtaccgtgtggtcagcgtcctcaccgtcctgcaccaggactggct
gaatggcaaggagtacaagtgcaaggtctccaacaaagccctcccagcccccatcgagaaaaccatctccaaagccaaag
ggcagccccgagaaccacaggtgtacaccctgcccccatcccgggatgagctgaccaagaaccaggtcagcctgacctgcct
ggtcaaaggcttctatccaagcgacatcgccgtggagtgggagagcaatgggcagccggagaacaactacaagaccacgcc
tcccgtgctggactccgacggctccttcttcctctacagcaagctcaccgtggacaagagcaggtggcagcaggggaacgtcttc
tcatgctccgtgatgcatgaggctctgcacaaccactacacgcagaagagcctctccctgtctccgggtaaatga (SEQ ID NO: 200)
>HER071_Protein_leader-stop
MEAPAQLLFLLLLWLPDTTGEVQLVETGEGLVKPGGSLRLSCTASGFTFRSYSLNWVRQAP
GQGLEWVSSISSTSTYIYYADSVKGRFTISRDDAKNTLYLQMNSLRAEDTAAYYCVRLGSG
GGYFPDYWGRGTLVTVSSGGGGSGGGGSGGGGSSELTQDPAVSVALGQTVRITCQGDS
LRSYYASWYQQKPGQAPVLVIYGKNNRPSGIPDRFSGSSSGNTASLTITGAQAEDEADYYC
NSRDSSGNHVVFGGGTKLTVLGDVREPKSSDKTHTCPPCPAPELLGGPSVFLFPPKPKDTL
MISRTPEVTCVVVDVSHEDPEVKFNWYVDGVEVHNAKTKPREEQYNSTYRVVSVLTVLHQ
DWLNGKEYKCKVSNKALPAPIEKTISKAKGQPREPQVYTLPPSRDELTKNQVSLTCLVKGF
YPSDIAVEWESNGQPENNYKTTPPVLDSDGSFFLYSKLTVDKSRWQQGNVFSCSVMHEAL
HNHYTQKSLSLSPGK (SEQ ID NO: 201)
>HER072_CDS
atggaagcaccagcgcagcttctcttcctcctgctactctggctcccagataccaccggtcaggtgcagctggtggagtctggggc
tgaggtgaagaagcctggggcctcagtgaaggtctcctgcaaggcttctggatacaccttcaccagttatgatatcaactgggtgc
gacaggcccccggacaaaggcttgagtggatgggatggatcaacgctggcaatggtaacacaaaatattcacagaagttcca
gggcagagtcaccattaccagggacacatccgcgagcacagcctacatggagctgaggagcctgagatctgacgacacggc
cgtgtattactgtgcgagagggaggagctatggccacccgtactactttgactactggggccagggaaccctggtcaccgtctcg
agtggtggaggcggttcaggcggaggtggcagcggcggtggcggatcgcagtctgtgctgactcagcctgcctccgtgtctggg
tctcctggacagtcgatcaccatctcctgcactggaaccagcagtgacgttggtggttataactatgtctcctggtaccaacaacac
ccaggcaaagcccccaaactcatgatttatgagggcagtaagcggccctcaggggtttctaatcgcttctctggctccaagtctgg
caacacggcctccctgacaatctctgggctccaggctgaggacgaggctgattattactgcagctcatatacaaccaggagcac
tcgagttttcggcggagggaccaagctgaccgtcctaggtgacgtacgcgagcccaaatcttctgacaaaactcacacatgccc
accgtgcccagcacctgaactcctgggtggaccgtcagtcttcctcttccccccaaaacccaaggacaccctcatgatctcccgg
acccctgaggtcacatgcgtggtggtggacgtgagccacgaagaccctgaggtcaagttcaactggtacgtggacggcgtgga
ggtgcataatgccaagacaaagccgcgggaggagcagtacaacagcacgtaccgtgtggtcagcgtcctcaccgtcctgcac
caggactggctgaatggcaaggagtacaagtgcaaggtctccaacaaagccctcccagcccccatcgagaaaaccatctcca
aagccaaagggcagccccgagaaccacaggtgtacaccctgcccccatcccgggatgagctgaccaagaaccaggtcagc
ctgacctgcctggtcaaaggcttctatccaagcgacatcgccgtggagtgggagagcaatgggcagccggagaacaactaca
agaccacgcctcccgtgctggactccgacggctccttcttcctctacagcaagctcaccgtggacaagagcaggtggcagcag
gggaacgtcttctcatgctccgtgatgcatgaggctctgcacaaccactacacgcagaagagcctctccctgtctccggg
taaatga (SEQ ID NO: 202)
>HER072_Protein_leader-stop
MEAPAQLLFLLLLWLPDTTGQVQLVESGAEVKKPGASVKVSCKASGYTFTSYDINWVRQAP
GQRLEWMGWINAGNGNTKYSQKFQGRVTITRDTSASTAYMELRSLRSDDTAVYYCARGR
SYGHPYYFDYWGQGTLVTVSSGGGGSGGGGSGGGGSQSVLTQPASVSGSPGQSITISCT
GTSSDVGGYNYVSWYQQHPGKAPKLMIYEGSKRPSGVSNRFSGSKSGNTASLTISGLQAE
DEADYYCSSYTTRSTRVFGGGTKLTVLGDVREPKSSDKTHTCPPCPAPELLGGPSVFLFPP
KPKDTLMISRTPEVTCVVVDVSHEDPEVKFNWYVDGVEVHNAKTKPREEQYNSTYRVVSV
LTVLHQDWLNGKEYKCKVSNKALPAPIEKTISKAKGQPREPQVYTLPPSRDELTKNQVSLTC
LVKGFYPSDIAVEWESNGQPENNYKTTPPVLDSDGSFFLYSKLTVDKSRWQQGNVFSCSV
MHEALHNHYTQKSLSLSPGK (SEQ ID NO: 203)
>HER073_CDS
atggaagcaccagcgcagcttctcttcctcctgctactctggctcccagataccaccggtaaggtgcagctggtgcagtctgggac
agaggtgaaaaagcccggggagtctctgaagatctcctgtcagggttctggatacaggtttagtagtgactggattgcctgggtgc
gccagatgcccgggaaaggcctggagtggatggggattgtctatcctggtgactctgataccagatatagcccgtccttccaagg
ccaagtcaccatctcagccgacaagtccatcagtactgcctacctgcagtggagcggcctgaaggcctcggacaccgccaagt
attactgtgcgagagtgcaacaggcagtgggagctaaaggttatgctatggacgtctggggcaagggaaccctggtcaccgtct
cgagtggaggcggcggttcaggcggaggtggctctggcggtggcggaagtgcacagactgtggtgatccaggagccatcgttc
tcagtgtcccctggagggacagtcacactcacttgtggcttgagctctggctcagtctctaccagttactaccccagctggtaccgg
cagaccccaggccaggctccacacacactcattcacaacacaaagattcgctcctctggggtccctgatcgcttctctggctccat
ccttgggaacaatgctgccctcaccatcacgggggcccaggcagatgatgaatctgattattactgtcttttgtatatgggtagcgg
catttacgtgttcggcggagggaccaagctgaccgtcctaggtgacgtacgcgagcccaaatcttctgacaaaactcacacatg
cccaccgtgcccagcacctgaactcctgggtggaccgtcagtcttcctcttccccccaaaacccaaggacaccctcatgatctcc
cggacccctgaggtcacatgcgtggtggtggacgtgagccacgaagaccctgaggtcaagttcaactggtacgtggacggcgt
ggaggtgcataatgccaagacaaagccgcgggaggagcagtacaacagcacgtaccgtgtggtcagcgtcctcaccgtcctg
caccaggactggctgaatggcaaggagtacaagtgcaaggtctccaacaaagccctcccagcccccatcgagaaaaccatct
ccaaagccaaagggcagccccgagaaccacaggtgtacaccctgcccccatcccgggatgagctgaccaagaaccaggtc
agcctgacctgcctggtcaaaggcttctatccaagcgacatcgccgtggagtgggagagcaatgggcagccggagaacaact
acaagaccacgcctcccgtgctggactccgacggctccttcttcctctacagcaagctcaccgtggacaagagcaggtggcag
caggggaacgtcttctcatgctccgtgatgcatgaggctctgcacaaccactacacgcagaagagcctctccctgtctccgggta
aatga (SEQ ID NO: 204)
>HER073_Protein_leader-stop
MEAPAQLLFLLLLWLPDTTGKVQLVQSGTEVKKPGESLKISCQGSGYRFSSDWIAWVRQM
PGKGLEWMGIVYPGDSDTRYSPSFQGQVTISADKSISTAYLQWSGLKASDTAKYYCARVQ
QAVGAKGYAMDVWGKGTLVTVSSGGGGSGGGGSGGGGSAQTVVIQEPSFSVSPGGTVT
LTCGLSSGSVSTSYYPSWYRQTPGQAPHTLIHNTKIRSSGVPDRFSGSILGNNAALTITGAQ
ADDESDYYCLLYMGSGIYVFGGGTKLTVLGDVREPKSSDKTHTCPPCPAPELLGGPSVFLF
PPKPKDTLMISRTPEVTCVVVDVSHEDPEVKFNWYVDGVEVHNAKTKPREEQYNSTYRVV
SVLTVLHQDWLNGKEYKCKVSNKALPAPIEKTISKAKGQPREPQVYTLPPSRDELTKNQVSL
TCLVKGFYPSDIAVEWESNGQPENNYKTTPPVLDSDGSFFLYSKLTVDKSRWQQGNVFSC
SVMHEALHNHYTQKSLSLSPGK (SEQ ID NO: 205)
>HER074_CDS
atggaagcaccagcgcagcttctcttcctcctgctactctggctcccagataccaccggtgaagtgcagctggtgcagtctggggc
tgaggtgaagaagcctggggcctcagtgagggtctcctgcaagggttctggaaacaccttcaccggccactacatccactgggt
gcgacaggcccctggacaaggacttgagtggctgggatggatcgaccctaacactggtgacatacagtattcagaaaactttaa
gggctcggtcaccttgaccagggacccatccatcaactcagtcttcatggacctgatcaggctgacatctgacgacacggccatg
tattactgtgcgagagaaggtgccgggctcgccaactactattactacggtctggacgtctggggccgagggacaatggtcacc
gtctcgagtggaggcggcggttcaggcggaggtggctctggcggtggcggaagtgcacagactgtggtgctccaggagccttc
gttctcagtgtcccctggggggacagtcacactcacttgtggcttgaactttggctcagtctctactgcttactaccccagttggtacca
gcagaccccaggccaagctccacgcacgctcatctacggcacaaatattcgttcctctggggtcccggatcgcttctctggctcca
tcgtagggaacaaagctgccctcaccatcacgggggcccagacagaagatgagtctgattattattgtgcgctgtatatgggtagt
ggcatgctcttcggcggcgggaccaaggtcaccgtcctaggtgacgtacgcgagcccaaatcttctgacaaaactcacacatgc
ccaccgtgcccagcacctgaactcctgggtggaccgtcagtcttcctcttccccccaaaacccaaggacaccctcatgatctccc
ggacccctgaggtcacatgcgtggtggtggacgtgagccacgaagaccctgaggtcaagttcaactggtacgtggacggcgtg
gaggtgcataatgccaagacaaagccgcgggaggagcagtacaacagcacgtaccgtgtggtcagcgtcctcaccgtcctgc
accaggactggctgaatggcaaggagtacaagtgcaaggtctccaacaaagccctcccagcccccatcgagaaaaccatctc
caaagccaaagggcagccccgagaaccacaggtgtacaccctgcccccatcccgggatgagctgaccaagaaccaggtca
gcctgacctgcctggtcaaaggcttctatccaagcgacatcgccgtggagtgggagagcaatgggcagccggagaacaacta
caagaccacgcctcccgtgctggactccgacggctccttcttcctctacagcaagctcaccgtggacaagagcaggtggcagc
aggggaacgtcttctcatgctccgtgatgcatgaggctctgcacaaccactacacgcagaagagcctctccctgtctccgggtaa
atga (SEQ ID NO: 206)
>HER074_Protein_leader-stop
MEAPAQLLFLLLLWLPDTTGEVQLVQSGAEVKKPGASVRVSCKGSGNTFTGHYIHWVRQA
PGQGLEWLGWIDPNTGDIQYSENFKGSVTLTRDPSINSVFMDLIRLTSDDTAMYYCAREGA
GLANYYYYGLDVWGRGTMVTVSSGGGGSGGGGSGGGGSAQTVVLQEPSFSVSPGGTVT
LTCGLNFGSVSTAYYPSWYQQTPGQAPRTLIYGTNIRSSGVPDRFSGSIVGNKAALTITGAQ
TEDESDYYCALYMGSGMLFGGGTKVTVLGDVREPKSSDKTHTCPPCPAPELLGGPSVFLF
PPKPKDTLMISRTPEVTCVVVDVSHEDPEVKFNWYVDGVEVHNAKTKPREEQYNSTYRVV
SVLTVLHQDWLNGKEYKCKVSNKALPAPIEKTISKAKGQPREPQVYTLPPSRDELTKNQVSL
TCLVKGFYPSDIAVEWESNGQPENNYKTTPPVLDSDGSFFLYSKLTVDKSRWQQGNVFSC
SVMHEALHNHYTQKSLSLSPGK (SEQ ID NO: 207)
>HER075_CDS
atggaagcaccagcgcagcttctcttcctcctgctactctggctcccagataccaccggtgaagtgcagctggtgcagtctggggc
tgaagtgaagaagcctggggcctcagtgaaggtctcttgtcaggcttctggatacaccttcagcgggcactatatgcacttggtgc
gacaggcccctggacaagggcttgagtggatggggtggatccaccctaccagtggtggcacaacctatgcacagaagtttcag
ggccgggtcgttatgaccagggacacgtccatcagcacagcctacatggaactgagtaggctgacatctgacgacacggccgt
gtattactgtgcaagaatgtcccaaaactatgatgcttttgatatctggggccaagggacaatggtcaccgtctcgagtggaggcg
gcggttcaggcggaggtggctctggcggtggcggaagtgcacaggctgtgctgactcagccgtcctcagtgtctggggccccag
ggcagagggtcaccatctcctgcactgggagcagctccaacatcggggcaggttatgatgtaaactggtaccaacaatttccag
gaacagcccccaaaattatcgtctatggcgatcggccctcaggggcccctgaccgattctctggctccaagtctggcacctcagc
ctccctggcaatcactggactccgggctgaggatgaggctgattattactgccagtcctgggacagtcgcctgagtagttatgtcttc
ggaactgggaccaaggtcaccgtcctaggtgacgtacgcgagcccaaatcttctgacaaaactcacacatgcccaccgtgccc
agcacctgaactcctgggtggaccgtcagtcttcctcttccccccaaaacccaaggacaccctcatgatctcccggacccctgag
gtcacatgcgtggtggtggacgtgagccacgaagaccctgaggtcaagttcaactggtacgtggacggcgtggaggtgcataat
gccaagacaaagccgcgggaggagcagtacaacagcacgtaccgtgtggtcagcgtcctcaccgtcctgcaccaggactgg
ctgaatggcaaggagtacaagtgcaaggtctccaacaaagccctcccagcccccatcgagaaaaccatctccaaagccaaa
gggcagccccgagaaccacaggtgtacaccctgcccccatcccgggatgagctgaccaagaaccaggtcagcctgacctgc
ctggtcaaaggcttctatccaagcgacatcgccgtggagtgggagagcaatgggcagccggagaacaactacaagaccacg
cctcccgtgctggactccgacggctccttcttcctctacagcaagctcaccgtggacaagagcaggtggcagcaggggaacgtc
ttctcatgctccgtgatgcatgaggctctgcacaaccactacacgcagaagagcctctccctgtctccgggtaaatga (SEQ ID NO: 208)
>HER075_Protein_leader-stop
MEAPAQLLFLLLLWLPDTTGEVQLVQSGAEVKKPGASVKVSCQASGYTFSGHYMHLVRQA
PGQGLEWMGWIHPTSGGTTYAQKFQGRVVMTRDTSISTAYMELSRLTSDDTAVYYCARM
SQNYDAFDIWGQGTMVTVSSGGGGSGGGGSGGGGSAQAVLTQPSSVSGAPGQRVTISC
TGSSSNIGAGYDVNWYQQFPGTAPKIIVYGDRPSGAPDRFSGSKSGTSASLAITGLRAEDE
ADYYCQSWDSRLSSYVFGTGTKVTVLGDVREPKSSDKTHTCPPCPAPELLGGPSVFLFPP
KPKDTLMISRTPEVTCVVVDVSHEDPEVKFNWYVDGVEVHNAKTKPREEQYNSTYRVVSV
LTVLHQDWLNGKEYKCKVSNKALPAPIEKTISKAKGQPREPQVYTLPPSRDELTKNQVSLTC
LVKGFYPSDIAVEWESNGQPENNYKTTPPVLDSDGSFFLYSKLTVDKSRWQQGNVFSCSV
MHEALHNHYTQKSLSLSPGK (SEQ ID NO: 209)
>HER076_CDS
atggaagcaccagcgcagcttctcttcctcctgctactctggctcccagataccaccggtgaggtgcagctggtgcagtctggggc
agaggtgaaaaagcccggagagtctctgaagatctcctgtaagggctctggatacacctttaccaaccactggatcgcctgggt
gcgccagatgcccgggaaaggcctggagtggatgggcatcatctatcctggtgactctgaaacgaggtacagcccgtccttcca
aggccacgtcaccatctcagccgacaagtccatcagtaccgcctatttgcagtggagcaccctgaaggactcggactccgccat
gtacttctgtgtgagacaggcccgtggctgggacgacggacgggctggatattattattccggtatggacgcctggggccaggga
accctggtcaccgtctcgagtggaggcggcggttcaggcggaggtggctctggcggtggcggaagtgcacaggctgtggtgct
ccaggagccatcgttctcagtgtcccctggagggacagtcacactcacctgtggcttgcgctctgggtcagtctctactagtcacta
ccccagctggtaccagcagaccccaggccaggctccacgcacgctcatttacagcacaaacactcgctcttctggggtccctga
tcgcttctctggctccatccttgggaacaaagctgccctcaccatcacgggggcccaggcagatgatgaatctaattattactgtat
gctatacatgggcagtggcatgtatgtgttcggcggagggaccaaggtcaccgtcctaggtgacgtacgcgagcccaaatcttct
gacaaaactcacacatgcccaccgtgcccagcacctgaactcctgggtggaccgtcagtcttcctcttccccccaaaacccaag
gacaccctcatgatctcccggacccctgaggtcacatgcgtggtggtggacgtgagccacgaagaccctgaggtcaagttcaa
ctggtacgtggacggcgtggaggtgcataatgccaagacaaagccgcgggaggagcagtacaacagcacgtaccgtgtggt
cagcgtcctcaccgtcctgcaccaggactggctgaatggcaaggagtacaagtgcaaggtctccaacaaagccctcccagcc
cccatcgagaaaaccatctccaaagccaaagggcagccccgagaaccacaggtgtacaccctgcccccatcccgggatga
gctgaccaagaaccaggtcagcctgacctgcctggtcaaaggcttctatccaagcgacatcgccgtggagtgggagagcaatg
ggcagccggagaacaactacaagaccacgcctcccgtgctggactccgacggctccttcttcctctacagcaagctcaccgtgg
acaagagcaggtggcagcaggggaacgtcttctcatgctccgtgatgcatgaggctctgcacaaccactacacgcagaagag
cctctccctgtctccgggtaaatga (SEQ ID NO: 210)
>HER076_Protein_leader-stop
MEAPAQLLFLLLLWLPDTTGEVQLVQSGAEVKKPGESLKISCKGSGYTFTNHWIAWVRQMP
GKGLEWMGIIYPGDSETRYSPSFQGHVTISADKSISTAYLQWSTLKDSDSAMYFCVRQARG
WDDGRAGYYYSGMDAWGQGTLVTVSSGGGGSGGGGSGGGGSAQAVVLQEPSFSVSPG
GTVTLTCGLRSGSVSTSHYPSWYQQTPGQAPRTLIYSTNTRSSGVPDRFSGSILGNKAALTI
TGAQADDESNYYCMLYMGSGMYVFGGGTKVTVLGDVREPKSSDKTHTCPPCPAPELLGG
PSVFLFPPKPKDTLMISRTPEVTCVVVDVSHEDPEVKFNWYVDGVEVHNAKTKPREEQYNS
TYRVVSVLTVLHQDWLNGKEYKCKVSNKALPAPIEKTISKAKGQPREPQVYTLPPSRDELTK
NQVSLTCLVKGFYPSDIAVEWESNGQPENNYKTTPPVLDSDGSFFLYSKLTVDKSRWQQG
NVFSCSVMHEALHNHYTQKSLSLSPGK (SEQ ID NO: 211)
>HER077_CDS
atggaagcaccagcgcagcttctcttcctcctgctactctggctcccagataccaccggtgaggtgcagctgttggagtctggggg
aggcttggtacagcctggggggtccctgagactctcctgtgcagcctctggattcacctttagcagctatgccatgagctgggtccg
ccaggctccagggaaggggctggagtgggtctcagctattagtggtagtggtggtagcacatactacgcagactccgtgaaggg
ccggttcaccatctccagagacaattccaagaacacgctgtatctgcaaatgaacagcctgagagccgaggacacggccgtgt
attactgtgcgagagatctgggaatagaccccctttggagtggttattacacaccccttgactattggggccgagggacaatggtc
accgtctcgagtggaggcggcggttcaggcggaggtggctctggcggtggcggaagtgcacacgttatactgactcaaccgcc
ctcagcgtctgggacccccgggcagagggtcaccatctcttgttctggaagcagctccaacatcggaagtaattccgttagctggt
accagcagctcccaggaacggcccccaaactcctcatgtatactaacaatcagcggccctcaggggtccctgaccgattctctg
gctccaagtctggcacctcagcctccctggccatcagtgggctccagtctgaggatgaggctgattattactgtgcgacatgggat
gccagcctgaatacttgggtgttcggcggagggaccaaggtcaccgtcctaggtgacgtacgcgagcccaaatcttctgacaaa
actcacacatgcccaccgtgcccagcacctgaactcctgggtggaccgtcagtcttcctcttccccccaaaacccaaggacacc
ctcatgatctcccggacccctgaggtcacatgcgtggtggtggacgtgagccacgaagaccctgaggtcaagttcaactggtac
gtggacggcgtggaggtgcataatgccaagacaaagccgcgggaggagcagtacaacagcacgtaccgtgtggtcagcgtc
ctcaccgtcctgcaccaggactggctgaatggcaaggagtacaagtgcaaggtctccaacaaagccctcccagcccccatcg
agaaaaccatctccaaagccaaagggcagccccgagaaccacaggtgtacaccctgcccccatcccgggatgagctgacc
aagaaccaggtcagcctgacctgcctggtcaaaggcttctatccaagcgacatcgccgtggagtgggagagcaatgggcagc
cggagaacaactacaagaccacgcctcccgtgctggactccgacggctccttcttcctctacagcaagctcaccgtggacaag
agcaggtggcagcaggggaacgtcttctcatgctccgtgatgcatgaggctctgcacaaccactacacgcagaagagcctctc
cctgtctccgggtaaatga SEQ ID NO: 212)
>HER077_Protein_leader-stop
MEAPAQLLFLLLLWLPDTTGEVQLLESGGGLVQPGGSLRLSCAASGFTFSSYAMSWVRQA
PGKGLEWVSAISGSGGSTYYADSVKGRFTISRDNSKNTLYLQMNSLRAEDTAVYYCARDL
GIDPLWSGYYTPLDYWGRGTMVTVSSGGGGSGGGGSGGGGSAHVILTQPPSASGTPGQ
RVTISCSGSSSNIGSNSVSWYQQLPGTAPKLLMYTNNQRPSGVPDRFSGSKSGTSASLAIS
GLQSEDEADYYCATWDASLNTWVFGGGTKVTVLGDVREPKSSDKTHTCPPCPAPELLGG
PSVFLFPPKPKDTLMISRTPEVTCVVVDVSHEDPEVKFNWYVDGVEVHNAKTKPREEQYNS
TYRVVSVLTVLHQDWLNGKEYKCKVSNKALPAPIEKTISKAKGQPREPQVYTLPPSRDELTK
NQVSLTCLVKGFYPSDIAVEWESNGQPENNYKTTPPVLDSDGSFFLYSKLTVDKSRWQQG
NVFSCSVMHEALHNHYTQKSLSLSPGK (SEQ ID NO: 213)
>HER078_CDS
atggaagcaccagcgcagcttctcttcctcctgctactctggctcccagataccaccggtgaggtccagctggtgcagtctggagc
tgaggtgaaggagcctggggcctcagtgaaggtctcctgcaaggcctctggttacgacttttccaactatggtttcagctgggtgcg
ccaggcccctggacaaggtcttgagtggatgggatggatcagctcttataatggttacacaaactatgcacagagactccaggg
cagagtcaccatgaccacagacacatccacgagcacagcctacatggagctgaggagcctgagatctgacgacacagctgt
ctattactgtgcgagagatcgaggacttggaaactggtacttcgatctctggggccaaggcaccctggtcaccgtctcgagtggtg
gaggcggttcaggcggaggtggcagcggcggtggcggatcgcagtctgtgctgactcagcctgcctccgtgtctgggtctcctgg
acagtcgatcaccatctcctgcactggaaccagcagtgacgttggtggttataactatgtctcctggtaccaacaacacccaggc
aaagcccccaaactcatgatttatgagggcagtaagcggccctcaggggtttctaatcgcttctctggctccaagtctggcaacac
ggcctccctgacaatctctgggctccaggctgaggacgaggctgattattactgcagctcatatacaaccaggagcactcgagttt
tcggcggagggaccaagctgaccgtcctaggtgacgtacgcgagcccaaatcttctgacaaaactcacacatgcccaccgtgc
ccagcacctgaactcctgggtggaccgtcagtcttcctcttccccccaaaacccaaggacaccctcatgatctcccggacccctg
aggtcacatgcgtggtggtggacgtgagccacgaagaccctgaggtcaagttcaactggtacgtggacggcgtggaggtgcat
aatgccaagacaaagccgcgggaggagcagtacaacagcacgtaccgtgtggtcagcgtcctcaccgtcctgcaccaggac
tggctgaatggcaaggagtacaagtgcaaggtctccaacaaagccctcccagcccccatcgagaaaaccatctccaaagcca
aagggcagccccgagaaccacaggtgtacaccctgcccccatcccgggatgagctgaccaagaaccaggtcagcctgacct
gcctggtcaaaggcttctatccaagcgacatcgccgtggagtgggagagcaatgggcagccggagaacaactacaagacca
cgcctcccgtgctggactccgacggctccttcttcctctacagcaagctcaccgtggacaagagcaggtggcagcaggggaac
gtcttctcatgctccgtgatgcatgaggctctgcacaaccactacacgcagaagagcctctccctgtctccgggtaaatga (SEQ ID NO: 214)
>HER078_Protein_leader-stop
MEAPAQLLFLLLLWLPDTTGEVQLVQSGAEVKEPGASVKVSCKASGYDFSNYGFSWVRQA
PGQGLEWMGWISSYNGYTNYAQRLQGRVTMTTDTSTSTAYMELRSLRSDDTAVYYCARD
RGLGNWYFDLWGQGTLVTVSSGGGGSGGGGSGGGGSQSVLTQPASVSGSPGQSITISCT
GTSSDVGGYNYVSWYQQHPGKAPKLMIYEGSKRPSGVSNRFSGSKSGNTASLTISGLQAE
DEADYYCSSYTTRSTRVFGGGTKLTVLGDVREPKSSDKTHTCPPCPAPELLGGPSVFLFPP
KPKDTLMISRTPEVTCVVVDVSHEDPEVKFNWYVDGVEVHNAKTKPREEQYNSTYRVVSV
LTVLHQDWLNGKEYKCKVSNKALPAPIEKTISKAKGQPREPQVYTLPPSRDELTKNQVSLTC
LVKGFYPSDIAVEWESNGQPENNYKTTPPVLDSDGSFFLYSKLTVDKSRWQQGNVFSCSV
MHEALHNHYTQKSLSLSPGK (SEQ ID NO: 215)
>HER079_CDS
atggaagcaccagcgcagcttctcttcctcctgctactctggctcccagataccaccggtcagatgcagctggtgcagtctggggg
aggcgtggtccagcctgggaggtccctgagactctcctgtgcagcctctggattcaccttcagtagctatggcatgcactgggtcc
gccaggctccaggcaaggggctggagtgggtggcagttatatcatatgatggaagtattaaatactatgcagactccgtgaagg
gccgattcaccatctccagagacaattccaagaacacactgtatctacaaatgaacagcctgagagccgaggacacgggcgtt
tattactgttcgaaagatcgctatagcagtggctggtacagctccgatgcttttgatatttggggccgagggacaatggtcaccgtct
cgagtggtggaggcggttcaggcggaggtggcagcggcggtggcggatcgtctgagctgactcaggaccctgctgtgtctgtgg
ccttgggacagacagtcaggatcacatgccaaggagacagcctcagaagctattatgcaagctggtaccagcagaagccag
gacaggcccctgtacttgtcatctatggtaaaaacaaccggccctcagggatcccagaccgattctctggctccagctcaggaaa
cacagcttccttgaccatcactggggctcaggcggaagatgaggctgactattactgtcattcccgggacagcagtggtaaccat
gtgcttttcggcggagggaccaagctgaccgtcctaggtgacgtacgcgagcccaaatcttctgacaaaactcacacatgccca
ccgtgcccagcacctgaactcctgggtggaccgtcagtcttcctcttccccccaaaacccaaggacaccctcatgatctcccgga
cccctgaggtcacatgcgtggtggtggacgtgagccacgaagaccctgaggtcaagttcaactggtacgtggacggcgtggag
gtgcataatgccaagacaaagccgcgggaggagcagtacaacagcacgtaccgtgtggtcagcgtcctcaccgtcctgcacc
aggactggctgaatggcaaggagtacaagtgcaaggtctccaacaaagccctcccagcccccatcgagaaaaccatctcca
aagccaaagggcagccccgagaaccacaggtgtacaccctgcccccatcccgggatgagctgaccaagaaccaggtcagc
ctgacctgcctggtcaaaggcttctatccaagcgacatcgccgtggagtgggagagcaatgggcagccggagaacaactaca
agaccacgcctcccgtgctggactccgacggctccttcttcctctacagcaagctcaccgtggacaagagcaggtggcagcag
gggaacgtcttctcatgctccgtgatgcatgaggctctgcacaaccactacacgcagaagagcctct
ccctgtctccgggtaaatga (SEQ ID NO: 216)
>HER079_Protein_leader-stop
MEAPAQLLFLLLLWLPDTTGQMQLVQSGGGVVQPGRSLRLSCAASGFTFSSYGMHWVRQ
APGKGLEWVAVISYDGSIKYYADSVKGRFTISRDNSKNTLYLQMNSLRAEDTGVYYCSKDR
YSSGWYSSDAFDIWGRGTMVTVSSGGGGSGGGGSGGGGSSELTQDPAVSVALGQTVRIT
CQGDSLRSYYASWYQQKPGQAPVLVIYGKNNRPSGIPDRFSGSSSGNTASLTITGAQAED
EADYYCHSRDSSGNHVLFGGGTKLTVLGDVREPKSSDKTHTCPPCPAPELLGGPSVFLFP
PKPKDTLMISRTPEVTCVVVDVSHEDPEVKFNWYVDGVEVHNAKTKPREEQYNSTYRVVS
VLTVLHQDWLNGKEYKCKVSNKALPAPIEKTISKAKGQPREPQVYTLPPSRDELTKNQVSLT
CLVKGFYPSDIAVEWESNGQPENNYKTTPPVLDSDGSFFLYSKLTVDKSRWQQGNVFSCS
VMHEALHNHYTQKSLSLSPGK (SEQ ID NO: 217)
>HER080_CDS
atggaagcaccagcgcagcttctcttcctcctgctactctggctcccagataccaccggtgaggtgcagctggtgcagtctggggg
aggcgtggtccagcctgggaggtccctgagactctcctgtgcagcctctggattcaccttcagtagctatggcatgcactgggtcc
gccaggctccaggcaaggggctggagtgggtggcagttatatcatatgatggaagtattaaatactatgcagactccgtgaagg
gccgattcaccatctccagagacaattccaagaacacgctgtatctgcaaatgaacagcctgagagctgaggacacggctgtgt
attactgtgcgcgaactggtgaatatagtggctacgatacgagtggttacagcaattggggccaaggcaccctggtcaccgtctc
gagtggtggaggcggttcaggcggaggtggcagcggcggtggcggatcgcagtctgtgctgactcagccaccctcagcgtctg
ggacccccgggcagagggtcaccatctcttgttctggaagcagctccaacatcgggagtaacactgtaaactggtaccagcga
ctcccaggagcggccccccaactcctcatctacaataatgaccagcggccctcagggatccctgaccgattctctggctccaagt
ctggcacctcaggctccctggtcatcagtgggctccagtctgaagatgaggctgattactactgtgcgtcatgggatgacagtctga
atggtcgggtgttcggcggagggaccaagctgaccgtcctaggtgacgtacgcgagcccaaatcttctgacaaaactcacacat
gcccaccgtgcccagcacctgaactcctgggtggaccgtcagtcttcctcttccccccaaaacccaaggacaccctcatgatctc
ccggacccctgaggtcacatgcgtggtggtggacgtgagccacgaagaccctgaggtcaagttcaactggtacgtggacggcg
tggaggtgcataatgccaagacaaagccgcgggaggagcagtacaacagcacgtaccgtgtggtcagcgtcctcaccgtcct
gcaccaggactggctgaatggcaaggagtacaagtgcaaggtctccaacaaagccctcccagcccccatcgagaaaaccat
ctccaaagccaaagggcagccccgagaaccacaggtgtacaccctgcccccatcccgggatgagctgaccaagaaccagg
tcagcctgacctgcctggtcaaaggcttctatccaagcgacatcgccgtggagtgggagagcaatgggcagccggagaacaa
ctacaagaccacgcctcccgtgctggactccgacggctccttcttcctctacagcaagctcaccgtggacaagagcaggtggca
gcaggggaacgtcttctcatgctccgtgatgcatgaggctctgcacaaccactacacgcagaagagcctctccctgtctccgggt
aaatga (SEQ ID NO: 218)
>HER080_Protein_leader-stop
MEAPAQLLFLLLLWLPDTTGEVQLVQSGGGVVQPGRSLRLSCAASGFTFSSYGMHWVRQ
APGKGLEWVAVISYDGSIKYYADSVKGRFTISRDNSKNTLYLQMNSLRAEDTAVYYCARTG
EYSGYDTSGYSNWGQGTLVTVSSGGGGSGGGGSGGGGSQSVLTQPPSASGTPGQRVTI
SCSGSSSNIGSNTVNWYQRLPGAAPQLLIYNNDQRPSGIPDRFSGSKSGTSGSLVISGLQS
EDEADYYCASWDDSLNGRVFGGGTKLTVLGDVREPKSSDKTHTCPPCPAPELLGGPSVFL
FPPKPKDTLMISRTPEVTCVVVDVSHEDPEVKFNWYVDGVEVHNAKTKPREEQYNSTYRV
VSVLTVLHQDWLNGKEYKCKVSNKALPAPIEKTISKAKGQPREPQVYTLPPSRDELTKNQV
SLTCLVKGFYPSDIAVEWESNGQPENNYKTTPPVLDSDGSFFLYSKLTVDKSRWQQGNVF
SCSVMHEALHNHYTQKSLSLSPGK (SEQ ID NO: 219)
>HER081_CDS
atggaagcaccagcgcagcttctcttcctcctgctactctggctcccagataccaccggtcaggtgcagctggtgcagtctggggg
aggcttggtccagccgggggggtccctgagactctcctgtgcagcctctggattcacgtttagtacctatgccatgagttgggcccg
ccaggctccagggaaggggctggagtgggtctcaagtattagtggtgatggtggaagaattctcgatgcagactccgcgaagg
gccggttcaccatctccagagacaattccaagaacacgctgtatctgcaaatgaacggcctgagagtcgaggacacggcccttt
attactgtgcgagagcggacggtaactactggggcagggggacaatggtcaccgtctcttcaggtggaggcggttcaggcgga
ggtggcagcggcggtggcggatcgcagtctgtgctgactcagcctgcctccgtgtctgggtctcctggacagtcgatcaccatctc
ctgcactggaaccagcagtgacgttggtggttataactatgtctcctggtaccaacaacacccaggcaaagcccccaaactcat
gatttatgagggcagtaagcggccctcaggggtttctaatcgcttctctggctccaagtctggcaacacggcctccctgacaatctc
tgggctccaggctgaggacgaggctgattattactgcagctcatatacaaccaggagcactcgagttttcggcggagggaccaa
gctgaccgtcctaggtgacgtacgcgagcccaaatcttctgacaaaactcacacatgcccaccgtgcccagcacctgaactcct
gggtggaccgtcagtcttcctcttccccccaaaacccaaggacaccctcatgatctcccggacccctgaggtcacatgcgtggtg
gtggacgtgagccacgaagaccctgaggtcaagttcaactggtacgtggacggcgtggaggtgcataatgccaagacaaagc
cgcgggaggagcagtacaacagcacgtaccgtgtggtcagcgtcctcaccgtcctgcaccaggactggctgaatggcaagga
gtacaagtgcaaggtctccaacaaagccctcccagcccccatcgagaaaaccatctccaaagccaaagggcagccccgag
aaccacaggtgtacaccctgcccccatcccgggatgagctgaccaagaaccaggtcagcctgacctgcctggtcaaaggcttc
tatccaagcgacatcgccgtggagtgggagagcaatgggcagccggagaacaactacaagaccacgcctcccgtgctggac
tccgacggctccttcttcctctacagcaagctcaccgtggacaagagcaggtggcagcaggggaacgtcttctcatgctccgtgat
gcatgaggctctgcacaaccactacacgcagaagagcctctccctgtctccgggtaaatga (SEQ ID NO: 220)
>HER081_Protein_leader-stop
MEAPAQLLFLLLLWLPDTTGQVQLVQSGGGLVQPGGSLRLSCAASGFTFSTYAMSWARQA
PGKGLEWVSSISGDGGRILDADSAKGRFTISRDNSKNTLYLQMNGLRVEDTALYYCARADG
NYWGRGTMVTVSSGGGGSGGGGSGGGGSQSVLTQPASVSGSPGQSITISCTGTSSDVG
GYNYVSWYQQHPGKAPKLMIYEGSKRPSGVSNRFSGSKSGNTASLTISGLQAEDEADYYC
SSYTTRSTRVFGGGTKLTVLGDVREPKSSDKTHTCPPCPAPELLGGPSVFLFPPKPKDTLMI
SRTPEVTCVVVDVSHEDPEVKFNWYVDGVEVHNAKTKPREEQYNSTYRVVSVLTVLHQD
WLNGKEYKCKVSNKALPAPIEKTISKAKGQPREPQVYTLPPSRDELTKNQVSLTCLVKGFYP
SDIAVEWESNGQPENNYKTTPPVLDSDGSFFLYSKLTVDKSRWQQGNVFSCSVMHEALHN
HYTQKSLSLSPGK (SEQ ID NO: 221)
>HER082_CDS
atggaagcaccagcgcagcttctcttcctcctgctactctggctcccagataccaccggtcaggtgcagctgcaggagtcggggg
gaggcgtggtccagcctggggggtccctgagactctcctgtgcagcgtctggattcaccttcagtggctatggcatgcactgggtc
cgccaggctccaggcaaggggctggagtgggtggcatctgtacggaacgatggaagtaatacatactacacagactccgtga
aggaccgattcaccatctccagagacaacaccaagaacacgctgtatctgcaaatgaacagcctgagagccgaggacacgg
ccgtatattactgtgccaagtcgagaagagtgatgtatggcacctcctattactttgactactggggcagaggcaccctggtcaccg
tctcctcaggtggaggcggttcaggcggaggtggcagcggcggtggcggatcgtctgagctgactcaggaccctgctgtgtctgt
ggccttgggacagacagtcaggatcacatgccaaggagacagcctcagaagctattatgcaagctggtaccagcagaagcc
aggacaggcccctgtacttgtcatctatggtaaaaacaaccggccctcagggatcccagaccgattctctggctccagctcagga
aacacagcttccttgaccatcactggggctcaggcggaagatgaggctgactattactgtaactcccgggacagcagtggtaac
catgtggtattcggcggagggaccaagctgaccgtcctaggtgacgtacgcgagcccaaatcttctgacaaaactcacacatgc
ccaccgtgcccagcacctgaactcctgggtggaccgtcagtcttcctcttccccccaaaacccaaaggacaccctcatgatctccc
ggacccctgaggtcacatgcgtggtggtggacgtgagccacgaagaccctgaggtcaagttcaactggtacgtggacggcgtg
gaggtgcataatgccaagacaaagccgcgggaggagcagtacaacagcacgtaccgtgtggtcagcgtcctcaccgtcctgc
accaggactggctgaatggcaaggagtacaagtgcaaggtctccaacaaagccctcccagcccccatcgagaaaaccatctc
caaagccaaagggcagccccgagaaccacaggtgtacaccctgcccccatcccgggatgagctgaccaagaaccaggtca
gcctgacctgcctggtcaaaggcttctatccaagcgacatcgccgtggagtgggagagcaatgggcagccggagaacaacta
caagaccacgcctcccgtgctggactccgacggctccttcttcctctacagcaagctcaccgtggacaagagcaggtggcagc
aggggaacgtcttctcatgctccgtgatgcatgaggctctgcacaaccactacacgcagaagagcctctccctgtctccgggtaa
atga (SEQ ID NO: 222)
>HER082_Protein_leader-stop
MEAPAQLLFLLLLWLPDTTGQVQLQESGGGVVQPGGSLRLSCAASGFTFSGYGMHWVRQ
APGKGLEWVASVRNDGSNTYYTDSVKDRFTISRDNTKNTLYLQMNSLRAEDTAVYYCAKS
RRVMYGTSYYFDYWGRGTLVTVSSGGGGSGGGGSGGGGSSELTQDPAVSVALGQTVRIT
CQGDSLRSYYASWYQQKPGQAPVLVIYGKNNRPSGIPDRFSGSSSGNTASLTITGAQAED
EADYYCNSRDSSGNHVVFGGGTKLTVLGDVREPKSSDKTHTCPPCPAPELLGGPSVFLFP
PKPKDTLMISRTPEVTCVVVDVSHEDPEVKFNWYVDGVEVHNAKTKPREEQYNSTYRVVS
VLTVLHQDWLNGKEYKCKVSNKALPAPIEKTISKAKGQPREPQVYTLPPSRDELTKNQVSLT
CLVKGFYPSDIAVEWESNGQPENNYKTTPPVLDSDGSFFLYSKLTVDKSRWQQGNVFSCS
VMHEALHNHYTQKSLSLSPGK (SEQ ID NO: 223)
>HER083_CDS
atggaagcaccagcgcagcttctcttcctcctgctactctggctcccagataccaccggtcaggtgcagctgcaggagtcgggcg
caggactggtgaagccttcggggaccctgtccctcacctgcgctgtctctggtggctccatcagcagtggtaactggtggagttgg
gtccgccagcccccagggaaggggctggagtggattggggaaatctctcatagtgggagcaccaactacaacccgtccctca
agagtcgagtcaccatatcagtagacaagtccaagaaccagttctccctgaacctgagttctgtgaccgccgcagacacggcc
gtgtattactgtgcgagagtaaggggtacggtgggggatacacggggacctgactactggggccagggaaccctggtcaccgt
ctcgagtggtggaggcggttcaggcggaggtggcagcggcggtggcggatcgtctgagctgactcaggaccctgctgtgtctgt
ggccttgggacagacagtcaggatcacatgccaaggagacagcctcagaagctattatgcaagctggtaccagcagaagcc
aggacaggcccctgtacttgtcatctatggtaaaaacaaccggccctcagggatcccagaccgattctctggctccagctcagga
aacacagcttccttgaccatcactggggctcaggcggaagatgaggctgactattactgtaactcccgggacagcagtggtaac
catgtggtattcggcggagggaccaagctgaccgtcctaggtgacgtacgcgagcccaaatcttctgacaaaactcacacatgc
ccaccgtgcccagcacctgaactcctgggtggaccgtcagtcttcctcttccccccaaaacccaaggacaccctcatgatctccc
ggacccctgaggtcacatgcgtggtggtggacgtgagccacgaagaccctgaggtcaagttcaactggtacgtggacggcgtg
gaggtgcataatgccaagacaaagccgcgggaggagcagtacaacagcacgtaccgtgtggtcagcgtcctcaccgtcctgc
accaggactggctgaatggcaaggagtacaagtgcaaggtctccaacaaagccctcccagcccccatcgagaaaaccatctc
caaagccaaagggcagccccgagaaccacaggtgtacaccctgcccccatcccgggatgagctgaccaagaaccaggtca
gcctgacctgcctggtcaaaggcttctatccaagcgacatcgccgtggagtgggagagcaatgggcagccggagaacaacta
caagaccacgcctcccgtgctggactccgacggctccttcttcctctacagcaagctcaccgtggacaagagcaggtggcagc
aggggaacgtcttctcatgctccgtgatgcatgaggctctgcacaaccactacacgcagaagagcctctccctgtctccgggtaa
atga (SEQ ID NO: 224)
>HER083_Protein_leader-stop
MEAPAQLLFLLLLWLPDTTGQVQLQESGAGLVKPSGTLSLTCAVSGGSISSGNWWSWVRQ
PPGKGLEWIGEISHSGSTNYNPSLKSRVTISVDKSKNQFSLNLSSVTAADTAVYYCARVRGT
VGDTRGPDYWGQGTLVTVSSGGGGSGGGGSGGGGSSELTQDPAVSVALGQTVRITCQG
DSLRSYYASWYQQKPGQAPVLVIYGKNNRPSGIPDRFSGSSSGNTASLTITGAQAEDEADY
YCNSRDSSGNHVVFGGGTKLTVLGDVREPKSSDKTHTCPPCPAPELLGGPSVFLFPPKPK
DTLMISRTPEVTCVVVDVSHEDPEVKFNWYVDGVEVHNAKTKPREEQYNSTYRVVSVLTVL
HQDWLNGKEYKCKVSNKALPAPIEKTISKAKGQPREPQVYTLPPSRDELTKNQVSLTCLVK
GFYPSDIAVEWESNGQPENNYKTTPPVLDSDGSFFLYSKLTVDKSRWQQGNVFSCSVMHE
ALHNHYTQKSLSLSPGK (SEQ ID NO: 225)
>HER084_CDS
atggaagcaccagcgcagcttctcttcctcctgctactctggctcccagataccaccggtgaggtgcagctggtgcagtctggggg
aggcctggtcaagcctggggggtccctgagactctcctgtgcagcgtctggattcaccttcagtagctatgggatgcactgggtcc
gccaggctccaggcaaggggctggagtgggtggcaggtattttttatgatggaggtaataaatactatgcagactccgtgaaggg
ccgattcaccatctccagagacaattccaagaacacgctgtatctgcaaatgaacagcctgagagctgaggacacggctgtgta
ttactgtgcgagagataggggctactactacatggacgtctggggcaaagggaccacggtcaccgtctcctcaggtggaggcg
gttcaggcggaggtggctctggcggtggcggatcgcagtctgtgttgacgcagccgccctcagtgtctggggccccaggacaga
gggtcaccatctcctgcactgggagaagctccaacatcggggcgggtcatgatgtacactggtaccagcaacttccaggaaca
gcccccaaactcctcatctatggtgacagcaatcggccctcaggggtccctgaccgattctctggctccaggtctggcacctcagc
ctccctggccatcactgggctccaggctgaagatgaggctgattattactgccagtcctatgacagcagcctgaggggttcggtatt
cggcggagggaccaaggtcaccgtcctaggtgacgtacgcgagcccaaatcttctgacaaaactcacacatgcccaccgtgc
ccagcacctgaactcctgggtggaccgtcagtcttcctcttccccccaaaacccaaggacaccctcatgatctcccggacccctg
aggtcacatgcgtggtggtggacgtgagccacgaagaccctgaggtcaagttcaactggtacgtggacggcgtggaggtgcat
aatgccaagacaaagccgcgggaggagcagtacaacagcacgtaccgtgtggtcagcgtcctcaccgtcctgcaccaggac
tggctgaatggcaaggagtacaagtgcaaggtctccaacaaagccctcccagcccccatcgagaaaaccatctccaaagcca
aagggcagccccgagaaccacaggtgtacaccctgcccccatcccgggatgagctgaccaagaaccaggtcagcctgacct
gcctggtcaaaggcttctatccaagcgacatcgccgtggagtgggagagcaatgggcagccggagaacaactacaagacca
cgcctcccgtgctggactccgacggctccttcttcctctacagcaagctcaccgtggacaagagcaggtggcagcaggggaac
gtcttctcatgctccgtgatgcatgaggctctgcacaaccactacacgcagaagagcctctccctgtctccgggtaaatga (SEQ ID NO: 226)
>HER084_Protein_leader-stop
MEAPAQLLFLLLLWLPDTTGEVQLVQSGGGLVKPGGSLRLSCAASGFTFSSYGMHWVRQA
PGKGLEWVAGIFYDGGNKYYADSVKGRFTISRDNSKNTLYLQMNSLRAEDTAVYYCARDR
GYYYMDVWGKGTTVTVSSGGGGSGGGGSGGGGSQSVLTQPPSVSGAPGQRVTISCTGR
SSNIGAGHDVHWYQQLPGTAPKLLIYGDSNRPSGVPDRFSGSRSGTSASLAITGLQAEDEA
DYYCQSYDSSLRGSVFGGGTKVTVLGDVREPKSSDKTHTCPPCPAPELLGGPSVFLFPPK
PKDTLMISRTPEVTCVVVDVSHEDPEVKFNWYVDGVEVHNAKTKPREEQYNSTYRVVSVL
TVLHQDWLNGKEYKCKVSNKALPAPIEKTISKAKGQPREPQVYTLPPSRDELTKNQVSLTCL
VKGFYPSDIAVEWESNGQPENNYKTTPPVLDSDGSFFLYSKLTVDKSRWQQGNVFSCSVM
HEALHNHYTQKSLSLSPGK (SEQ ID NO: 227)
>HER085_CDS
atggaagcaccagcgcagcttctcttcctcctgctactctggctcccagataccaccggtgaggtgcagctgttggagtctggggg
aggcttggtacagcctggggggtccctgagactctcctgtgcagcctctggattcacctttagcagctatgccatgagctgggtccg
ccaggctccagggaaggggctggagtgggtctcagctattagtggtagtggtggtagcacatactacgcagactccgtgaaggg
ccggttcaccatctccagagacaattccaagaacacgctgtatctgcaaatgaacagcctgagagccgaggacacggccgtgt
attactgtgcgagaggcgggagtgggagtgactactggggccaggggacaatggtcaccgtctcgagtggaggcggcggttc
aggcggaggtggctctggcggtggcggaagtgcacttaattttatgctgactcagccccactctgtgtcggggtctccggggaag
acggtaaccatctcctgcacccgcagcagtggctacattgacagcaagtatgtgcagtggtaccagcagcgcccgggcagtgc
ccccaccactgtgatctatgaggataaccgaagaccctctggggtccctgatcggttctctggctccatcgacagctcctccaactc
tgcctccctcaccatctctggactggagactgaggacgaggctgactattactgtcagtcttatgatgacaccaatgtggtgttcggc
ggagggaccaaggtcaccgtcctaggtgacgtacgcgagcccaaatcttctgacaaaactcacacatgcccaccgtgcccag
cacctgaactcctgggtggaccgtcagtcttcctcttccccccaaaacccaaggacaccctcatgatctcccggacccctgaggt
cacatgcgtggtggtggacgtgagccacgaagaccctgaggtcaagttcaactggtacgtggacggcgtggaggtgcataatg
ccaagacaaagccgcgggaggagcagtacaacagcacgtaccgtgtggtcagcgtcctcaccgtcctgcaccaggactggct
gaatggcaaggagtacaagtgcaaggtctccaacaaagccctcccagcccccatcgagaaaaccatctccaaagccaaag
ggcagccccgagaaccacaggtgtacaccctgcccccatcccgggatgagctgaccaagaaccaggtcagcctgacctgcct
ggtcaaaggcttctatccaagcgacatcgccgtggagtgggagagcaatgggcagccggagaacaactacaagaccacgcc
tcccgtgctggactccgacggctccttcttcctctacagcaagctcaccgtggacaagagcaggtggcagcaggggaacgtcttc
tcatgctccgtgatgcatgaggctctgcacaaccactacacgcagaagagcctctccctgtctccgggtaaatga (SEQ ID NO: 228)
>HER085_Protein_leader-stop
MEAPAQLLFLLLLWLPDTTGEVQLLESGGGLVQPGGSLRLSCAASGFTFSSYAMSWVRQA
PGKGLEWVSAISGSGGSTYYADSVKGRFTISRDNSKNTLYLQMNSLRAEDTAVYYCARGG
SGSDYWGQGTMVTVSSGGGGSGGGGSGGGGSALNFMLTQPHSVSGSPGKTVTISCTRS
SGYIDSKYVQWYQQRPGSAPTTVIYEDNRRPSGVPDRFSGSIDSSSNSASLTISGLETEDE
ADYYCQSYDDTNVVFGGGTKVTVLGDVREPKSSDKTHTCPPCPAPELLGGPSVFLFPPKP
KDTLMISRTPEVTCVVVDVSHEDPEVKFNWYVDGVEVHNAKTKPREEQYNSTYRVVSVLT
VLHQDWLNGKEYKCKVSNKALPAPIEKTISKAKGQPREPQVYTLPPSRDELTKNQVSLTCL
VKGFYPSDIAVEWESNGQPENNYKTTPPVLDSDGSFFLYSKLTVDKSRWQQGNVFSCSVM
HEALHNHYTQKSLSLSPGK (SEQ ID NO: 229)
>HER086_CDS
atggaagcaccagcgcagcttctcttcctcctgctactctggctcccagataccaccggtggggtgcagctggtggagtctgggg
gaggcctggtcaagcctggggggtccctgagactctcctgtgcagcctctggattcaccttcagtagctataacatgaactgggtc
cgccaggctccagggaagggactggagtgggtctcagctattagtggtagtggtggtagcacatactacgcagactccgtgacg
ggccggttcaccatctccagagacaattccaagaacacgctgtatctgcaaatgaacagcctgagagccgaggacacggccg
tatattactgtgcgaaagataccagtggctggtacggggacggtatggacgtctggggccggggaaccctggtcaccgtctcga
gtggtggaggcggttcaggcggaggtggcagcggcggtggcggatcggacatccagatgacccagtctccttccaccctgtctg
catctattggagacagagtcaccatcacctgccgggccagtgagggtatttatcactggttggcctggtatcagcagaagccagg
gaaagcccctaaactcctgatctataaggcctctagtttagccagtggggccccatcaaggttcagcggcagtggatcagggac
agatttcactctcaccatcagcagcctgcagcctgatgattttgcaacttattactgccaacaatatagtaattatccgctcactttcgg
cggagggaccaagctggagatcaaacgtgacgtacgcgagcccaaatcttctgacaaaactcacacatgcccaccgtgccca
gcacctgaactcctgggtggaccgtcagtcttcctcttccccccaaaacccaaggacaccctcatgatctcccggacccctgagg
tcacatgcgtggtggtggacgtgagccacgaagaccctgaggtcaagttcaactggtacgtggacggcgtggaggtgcataatg
ccaagacaaagccgcgggaggagcagtacaacagcacgtaccgtgtggtcagcgtcctcaccgtcctgcaccaggactggct
gaatggcaaggagtacaagtgcaaggtctccaacaaagccctcccagcccccatcgagaaaaccatctccaaagccaaag
ggcagccccgagaaccacaggtgtacaccctgcccccatcccgggatgagctgaccaagaaccaggtcagcctgacctgcct
ggtcaaaggcttctatccaagcgacatcgccgtggagtgggagagcaatgggcagccggagaacaactacaagaccacgcc
tcccgtgctggactccgacggctccttcttcctctacagcaagctcaccgtggacaagagcaggtggcagcaggggaacgtcttc
tcatgctccgtgatgcatgaggctctgcacaaccactacacgcagaagagcctctccctgtctccgggtaaatga (SEQ ID NO: 230)
>HER086_Protein_leader-stop
MEAPAQLLFLLLLWLPDTTGGVQLVESGGGLVKPGGSLRLSCAASGFTFSSYNMNWVRQA
PGKGLEWVSAISGSGGSTYYADSVTGRFTISRDNSKNTLYLQMNSLRAEDTAVYYCAKDTS
GWYGDGMDVWGRGTLVTVSSGGGGSGGGGSGGGGSDIQMTQSPSTLSASIGDRVTITC
RASEGIYHWLAWYQQKPGKAPKLLIYKASSLASGAPSRFSGSGSGTDFTLTISSLQPDDFAT
YYCQQYSNYPLTFGGGTKLEIKRDVREPKSSDKTHTCPPCPAPELLGGPSVFLFPPKPKDT
LMISRTPEVTCVVVDVSHEDPEVKFNWYVDGVEVHNAKTKPREEQYNSTYRVVSVLTVLH
QDWLNGKEYKCKVSNKALPAPIEKTISKAKGQPREPQVYTLPPSRDELTKNQVSLTCLVKG
FYPSDIAVEWESNGQPENNYKTTPPVLDSDGSFFLYSKLTVDKSRWQQGNVFSCSVMHEA
LHNHYTQKSLSLSPGK (SEQ ID NO: 231)
>HER087_CDS
atggaagcaccagcgcagcttctcttcctcctgctactctggctcccagataccaccggtgaggtgcagctgttggagtctggggg
aggcttggtacagcctggggggtccctgagactctcctgtgcagcctctggattcacctttagcagctatgccatgagctgggtccg
ccaggctccagggaaggggctggagtgggtctcagctattagtggtagtggtggtagcacatactacgcagactccgtgaaggg
ccggttcaccatctccagagacaattccaagaacacgctgtatctgcaaatgaacagcctgagagccgaggacacggccgtgt
attactgtgcgagagtcagcgggagccactttccattctttgactcctggggccaggggacaatggtcaccgtctcgagtggaggc
ggcggttcaggcggaggtggctctggcggtggcggaagtgcacagtctgtgctgactcagccaccctcggtgtcagtggcccca
ggacagacggccagaattacctgtgggggagacaagattggacataaaagtgtgcattggtatcagcagaagccaggccag
gcccctgtgttgctcgtctatgatgataggaagcggccctcagggatccctgagcgattctctggctccaactctgggaacacggc
caccctgaccatcagcagggtcgaggccggggatgaggctgcctatcactgtcaggtgtgggatagaagtagtgacccttatgt
cttcggaactgggaccaaggtcaccgtcctaggtgacgtacgcgagcccaaatcttctgacaaaactcacacatgcccaccgtg
cccagcacctgaactcctgggtggaccgtcagtcttcctcttccccccaaaacccaaggacaccctcatgatctcccggacccct
gaggtcacatgcgtggtggtggacgtgagccacgaagaccctgaggtcaagttcaactggtacgtggacggcgtggaggtgca
taatgccaagacaaagccgcgggaggagcagtacaacagcacgtaccgtgtggtcagcgtcctcaccgtcctgcaccagga
ctggctgaatggcaaggagtacaagtgcaaggtctccaacaaagccctcccagcccccatcgagaaaaccatctccaaagcc
aaagggcagccccgagaaccacaggtgtacaccctgcccccatcccgggatgagctgaccaagaaccaggtcagcctgac
ctgcctggtcaaaggcttctatccaagcgacatcgccgtggagtgggagagcaatgggcagccggagaacaactacaagacc
acgcctcccgtgctggactccgacggctccttcttcctctacagcaagctcaccgtggacaagagcaggtggcagcaggggaa
cgtcttctcatgctccgtgatgcatgaggctctgcacaaccactacacgcagaagagcctctccctgtctccgggtaaatga (SEQ ID NO: 232)
>HER087_Protein_leader-stop
MEAPAQLLFLLLLWLPDTTGEVQLLESGGGLVQPGGSLRLSCAASGFTFSSYAMSWVRQA
PGKGLEWVSAISGSGGSTYYADSVKGRFTISRDNSKNTLYLQMNSLRAEDTAVYYCARVS
GSHFPFFDSWGQGTMVTVSSGGGGSGGGGSGGGGSAQSVLTQPPSVSVAPGQTARITC
GGDKIGHKSVHWYQQKPGQAPVLLVYDDRKRPSGIPERFSGSNSGNTATLTISRVEAGDE
AAYHCQVWDRSSDPYVFGTGTKVTVLGDVREPKSSDKTHTCPPCPAPELLGGPSVFLFPP
KPKDTLMISRTPEVTCVVVDVSHEDPEVKFNWYVDGVEVHNAKTKPREEQYNSTYRVVSV
LTVLHQDWLNGKEYKCKVSNKALPAPIEKTISKAKGQPREPQVYTLPPSRDELTKNQVSLTC
LVKGFYPSDIAVEWESNGQPENNYKTTPPVLDSDGSFFLYSKLTVDKSRWQQGNVFSCSV
MHEALHNHYTQKSLSLSPGK (SEQ ID NO: 233)
>HER_SMIPs_huVk3_Leader_CDS
atggaagcaccagcgcagcttctcttcctcctgctactctggctcccagataccaccggt (SEQ ID NO: 234)
>HER_SMIPs_huVk3_Leader_Protein
MEAPAQLLFLLLLWLPDTTG (SEQ ID NO: 235)
>HER_SMIPs_G4Sx3_Linker_CDS
ggaggcggcggttcaggcggaggtggctctggcggtggcggaagt (SEQ ID NO: 236)
>HER_SMIPs_G4Sx3_Linker_Protein
GGGGSGGGGSGGGGS (SEQ ID NO: 237)
>HER_SMIPs_SCCP_Hinge_CDS
gagcccaaatcttctgacaaaactcacacatgcccaccgtgccca (SEQ ID NO: 238)
>HER_SMIPs_SCCP_Hinge_Protein
EPKSSDKTHTCPPCP (SEQ ID NO: 239)
>HER_SMIP_Fc-Stop_CDS
gacgtacgcgagcccaaatcttctgacaaaactcacacatgcccaccgtgcccagcacctgaactcctgggtggaccgtcagt
cttcctcttccccccaaaacccaaggacaccctcatgatctcccggacccctgaggtcacatgcgtggtggtggacgtgagocac
gaagaccctgaggtcaagttcaactggtacgtggacggcgtggaggtgcataatgccaagacaaagccgcgggaggagcag
tacaacagcacgtaccgtgtggtcagcgtcctcaccgtcctgcaccaggactggctgaatggcaaggagtacaagtgcaaggt
ctccaacaaagccctcccagcccccatcgagaaaaccatctccaaagccaaagggcagccccgagaaccacaggtgtaca
ccctgcccccatcccgggatgagctgaccaagaaccaggtcagcctgacctgcctggtcaaaggcttctatccaagcgacatc
gccgtggagtgggagagcaatgggcagccggagaacaactacaagaccacgcctcccgtgctggactccgacggctccttct
tcctctacagcaagctcaccgtggacaagagcaggtggcagcaggggaacgtcttctcatgctccgtgatgcatgaggctctgc
acaaccactacacgcagaagagcctctccctgtctccgggtaaatga (SEQ ID NO: 240)
>HER_SMIP_Fc_Stop_Protein
DVREPKSSDKTHTCPPCPAPELLGGPSVFLFPPKPKDTLMISRTPEVTCVVVDVSHEDPEV
KFNWYVDGVEVHNAKTKPREEQYNSTYRVVSVLTVLHQDWLNGKEYKCKVSNKALPAPIE
KTISKAKGQPREPQVYTLPPSRDELTKNQVSLTCLVKGFYPSDIAVEWESNGQPENNYKTT
PPVLDSDGSFFLYSKLTVDKSRWQQGNVFSCSVMHEALHNHYTQKSLSLSPGK (SEQ ID NO: 241)
Her2_S1R3B1_DP47_3A2
V_{H} with CDR1, CDR2 and CDR3 underlined
EVQLLESGGGLVQPGGSLRLSCAASGFTFSSYAMSWVRQTPGKGLEWVSAISGSGGSTYYAN
SVKGRFTISRDNSKNTLYLQMNSLRAEDTAVYYCARGGGYNPFDSWGQGTMVTVSS (SEQ ID NO: 251)
GAGGTGCAGCTGTTGGAGTCTGGGGGAGGCTTGGTACAGCCTGGGGGGTCCCTGAGACT
CTCCTGTGCAGCCTCTGGATTCACCTTTAGCAGCTATGCCATGAGCTGGGTCCGCCAGAC
TCCAGGGAAGGGGCTGGAGTGGGTCTCAGCTATTAGTGGTAGTGGTGGTAGCACATACT
ACGCAAACTCCGTGAAGGGCCGGTTCACCATCTCCAGAGACAATTCCAAGAACACGCTG
TATCTGCAAATGAACAGCCTGAGAGCCGAGGACACGGCCGTGTATTACTGTGCGCGGGG
GGGAGGCTACAACCCTTTTGACTCCTGGGGCCAGGGGACAATGGTCACCGTCTCGAGT (SEQ ID NO: 252)
V_{L} with CDR1, CDR2 and CDR3 underlined
QSALTQPASVSGSPGQSITISCTGTGSDVGGYNYVSWYQQHPGKAPKLMIYEVINRPSGISNR
FSGSKSGNTASLTISGLQAEDEADYYCGSYSSSSTLVFGGGTKLTVL (SEQ ID NO: 253)
CAGTCTGCCCTGACTCAGCCTGCCTCCGTGTCTGGGTCTCCTGGACAGTCGATCACCATCT
CCTGCACTGGAACCGGCAGTGACGTTGGTGGTTATAACTATGTCTCCTGGTACCAACAGC
ACCCAGGCAAAGCCCCCAAACTCATGATTTATGAGGTCATTAATCGGCCCTCAGGGATTT
CTAATCGCTTCTCTGGCTCCAAGTCTGGCAACACGGCCTCCCTGACCATCTCTGGGCTCC
AGGCTGAGGACGAGGCTGATTATTACTGCGGCTCATATTCAAGCAGCAGCACTCTTGTAT
TCGGCGGAGGGACCAAGCTGACCGTCCTA (SEQ ID NO: 254)
Her2_S1R3A1_DP47_11B7
V_{H} with CDR1, CDR2 and CDR3 underlined
EVQLLESGGGLVQPGGSLRLSCAASGFTFSSYAMSWVRQAPGKGLEWVSAISGSGGSTYYA
DSVKGRFTISRDNSKNTLYLQMNSLRAEDTAVYYCAGAADYSNYFDFWGQGTMVTVSS (SEQ ID NO: 255)
GAGGTGCAGCTGTTGGAGTCTGGGGGAGGCTTGGTACAGCCTGGGGGGTCCCTGAGACT
CTCCTGTGCAGCCTCTGGATTCACCTTTAGCAGCTATGCCATGAGCTGGGTCCGCCAGGC
TCCAGGGAAGGGGCTGGAGTGGGTCTCAGCTATTAGTGGTAGTGGTGGTAGCACATACT
ACGCAGACTCCGTGAAGGGCCGGTTCACCATCTCCAGAGACAATTCCAAGAACACGCTG
TATCTGCAAATGAACAGCCTGAGAGCCGAGGACACGGCCGTGTATTACTGTGCGGGAGC
GGCGGACTACAGTAATTACTTTGACTTTTGGGGCCAAGGGACAATGGTCACCGTCTCGAGT (SEQ ID NO: 256)
V_{L} with CDR1, CDR2 and CDR3 underlined
QSVLTQPPSVSGAPGQRVTISCTGSSSNIGAGYDVHWYQQLPGAAPKLLIYGNINRPSGVPDR
FSGSKSGTSASLAITGLQAEDEGDYYCQSYDRSLSAKLFGGGTKVTVL (SEQ ID NO: 257)
CAGTCTGTGCTGACTCAGCCACCCTCAGTGTCTGGGGCCCCAGGGCAGAGGGTCACCATC
TCCTGCACTGGGAGCAGCTCCAACATCGGGGCAGGTTATGATGTACACTGGTACCAGCA
ACTTCCAGGAGCAGCCCCCAAACTCCTCATCTATGGGAACATCAATCGGCCCTCAGGGGT
CCCTGACCGATTCTCTGGCTCCAAGTCTGGCACCTCAGCCTCCCTGGCCATCACTGGGCT
CCAGGCTGAGGATGAGGGTGATTATTACTGCCAGTCCTATGACAGAAGCCTGAGTGCTA
AGCTGTTCGGCGGAGGGACCAAGGTCACCGTCCTA (SEQ ID NO: 258)
Her2_S1R3A1_DP47_11D1
V_{H} with CDR1, CDR2 and CDR3 underlined
EVQLLESGGGLVQPGGSLRLSCAASGFTFSSYAMSWVRQAPGKGLEWVSAISGSGGSTYYA
DSVKGRFTISRDNSKNALYLQMNSLRAEDTAVYYCARDLGIDPLWSGYYTPLDYWGRGTM
VTVSS (SEQ ID NO: 259)
GAGGTGCAGCTGTTGGAGTCTGGGGGAGGCTTGGTACAGCCTGGGGGGTCCCTGAGACT
CTCCTGTGCAGCCTCTGGATTCACCTTTAGCAGCTATGCCATGAGCTGGGTCCGCCAGGC
TCCAGGGAAGGGGCTGGAGTGGGTCTCAGCTATTAGTGGTAGTGGTGGTAGCACATACT
ACGCAGACTCCGTGAAGGGCCGGTTCACCATCTCCAGAGACAATTCCAAGAACGCGCTG
TATCTGCAAATGAACAGCCTGAGAGCCGAGGACACGGCCGTGTATTACTGTGCGAGAGA
TCTGGGAATAGACCCCCTTTGGAGTGGTTATTACACACCCCTTGACTATTGGGGCCGGGG
GACAATGGTCACCGTCTCGAGT (SEQ ID NO: 260)
V_{L} with CDR1, CDR2 and CDR3 underlined
SSELTQDPALSVALGQTVRITCQGDSLGGFHASWYQEKPGQAPVFVLYGKNNRPSGIPDRFS
GSTSGNTAALTITGAQAEDEADYYCSSRDRSGNHRVFGGGTKLTVL (SEQ ID NO: 261)
TCTTCTGAGCTGACTCAGGACCCTGCTCTGTCGGTGGCCTTGGGACAGACAGTCAGGATC
ACATGTCAAGGGGACAGCCTCGGAGGCTTTCATGCAAGCTGGTACCAGGAGAAGCCAGG
ACAGGCCCCTGTATTTGTCCTCTATGGTAAAAACAACCGGCCCTCAGGGATCCCAGACCG
ATTCTCTGGCTCCACCTCAGGTAACACAGCTGCCCTGACCATCACTGGGGCTCAGGCGGA
AGATGAGGCTGACTATTACTGTAGCTCCCGGGACAGAAGTGGTAACCATCGCGTCTTCGG
CGGAGGGACCAAGCTGACCGTCCTA (SEQ ID NO: 262)
Her2_S1R3A1_DP47_7F3
V_{H} with CDR1, CDR2 and CDR3 underlined
EVQLLESGGGLVQPGGSLRLSCAASGFTFSSYAMSWVRQAPGKGLEWVSAISGSGGSTYYA
DSVKGRFTISRDNSKNTLYLQMNSLRAEDTAVYYCARDRALVGATRTFGYWGQGTTVTVSS (SEQ ID NO: 263)
GAGGTGCAGCTGTTGGAGTCTGGGGGAGGCTTGGTACAGCCTGGGGGGTCCCTGAGACT
CTCCTGTGCAGCCTCTGGATTCACCTTTAGCAGCTATGCCATGAGCTGGGTCCGCCAGGC
TCCAGGGAAGGGGCTGGAGTGGGTCTCAGCTATTAGTGGTAGTGGTGGTAGCACATACT
ACGCAGACTCCGTGAAGGGCCGGTTCACCATCTCCAGAGACAATTCCAAGAACACGCTG
TATCTGCAAATGAACAGCCTGAGAGCCGAGGACACGGCCGTGTATTACTGTGCGAGAGA
TCGAGCCCTAGTGGGAGCTACTCGAACTTTTGGCTACTGGGGGCAGGGGACCACGGTCA
CCGTCTCGAGT (SEQ ID NO: 264)
V_{L} with CDR1, CDR2 and CDR3 underlined
QAVLTQPSSVSGAPGQRVTISCTGSSSNIGAGYDVHWYQQLPGTAPKLLIYGDTNRPSGVPDR
FSGSKSGTSASLAITGLQAEDEADYYCQSFDSSLSGSVFGGGTKLTVL (SEQ ID NO: 265)
CAGGCTGTGCTGACTCAGCCGTCCTCAGTGTCTGGGGCCCCAGGGCAGAGGGTCACCATC
TCCTGCACTGGGAGCAGCTCCAACATCGGGGCAGGTTATGATGTACACTGGTACCAGCA
GCTTCCAGGAACAGCCCCCAAACTCCTCATCTATGGTGACACCAATCGGCCCTCAGGGGT
CCCTGACCGATTCTCTGGCTCCAAGTCTGGCACCTCAGCCTCCCTGGCCATCACTGGGCT
CCAGGCTGAGGATGAGGCTGATTATTACTGCCAGTCCTTTGACAGCAGCCTCAGTGGTTC
GGTGTTCGGCGGAGGGACCAAGCTGACCGTCCTA (SEQ ID NO: 266)
Her2_S1R2B_DP47_4E3
V_{H} with CDR1, CDR2 and CDR3 underlined
EVLLLESGGGLVQPGGSLRLSCAASGFTFSSYAMSWVRQAPGKGLEWVSAISGSGGSTYYAD
SAKGRFTISRDNSKNTLYLQMNSLRAEDTAVYYCARDRVSNWNYYGQDSYFDYWGQGTM
VTVSS (SEQ ID NO: 267)
GAGGTGCTGCTGTTGGAGTCTGGGGGAGGCTTGGTACAGCCTGGGGGGTCCCTGAGACT
CTCCTGTGCAGCCTCTGGATTCACCTTTAGCAGCTATGCCATGAGCTGGGTCCGCCAGGC
TCCAGGGAAGGGGCTGGAGTGGGTCTCAGCTATCAGTGGTAGTGGTGGTAGCACATACT
ACGCAGACTCCGCGAAGGGCCGGTTCACCATCTCCAGAGACAATTCCAAGAACACGCTG
TATCTGCAAATGAACAGCCTGAGAGCCGAGGACACGGCCGTGTATTACTGTGCGAGGGA
CAGGGTCTCTAACTGGAACTACTACGGCCAGGACAGCTACTTTGACTACTGGGGCCAAG
GGACAATGGTCACCGTCTCGAGT (SEQ ID NO: 268)
V_{L} with CDR1, CDR2 and CDR3 underlined
QAVLTQPPSASGTPGQRVTISCSGSSSNIGSNYVYWYQQLPGTAPKVLIYRNNQRPSGVPDRF
SGSKSGTSASLAISGLRSEDEADYYCASWDGSLSGPVFGGGTKLTVL (SEQ ID NO: 269)
CAGGCTGTGCTGACTCAGCCACCCTCAGCGTCTGGGACCCCCGGGCAGAGGGTCACCAT
CTCTTGTTCTGGAAGCAGCTCCAACATCGGAAGTAATTATGTATACTGGTACCAGCAACT
CCCAGGAACGGCCCCCAAAGTCCTCATCTATAGGAATAATCAGCGGCCCTCAGGGGTCC
CTGACCGATTCTCTGGCTCCAAGTCTGGCACCTCAGCGTCCCTGGCCATCAGTGGGCTCC
GGTCCGAGGATGAGGCTGATTATTACTGTGCATCATGGGATGGCAGCCTGAGTGGTCCG
GTGTTCGGCGGAGGGACCAAGCTGACCGTCCTA (SEQ ID NO: 270)
Her2_S1R3C1_DP47_2G2
V_{H} with CDR1, CDR2 and CDR3 underlined
EVQLLESGGGLVQPGGSLRLSCAASGFTFSSYAMSWVRQAPGKGLEWVSAISGSGGSTYYA
DSVKGRFTISRDNSKNTLYLQMNSLRAEDTAVYYCARDRVSNWNYYGQDSYFGYWGQGT
MVTVSS (SEQ ID NO: 271)
GAGGTGCAGCTGTTGGAGTCTGGGGGAGGCTTGGTACAGCCTGGGGGGTCCCTGAGACT
CTCCTGTGCAGCCTCTGGATTCACCTTTAGCAGCTATGCCATGAGCTGGGTCCGCCAGGC
TCCAGGGAAGGGGCTGGAGTGGGTCTCAGCTATTAGTGGTAGTGGTGGTAGCACATACT
ACGCAGACTCCGTGAAGGGCCGGTTCACCATCTCCAGAGACAATTCCAAGAACACGCTG
TATCTGCAAATGAACAGCCTGAGAGCCGAGGACACGGCCGTGTATTACTGTGCGAGGGA
CAGGGTCTCTAACTGGAACTACTACGGCCAGGACAGCTACTTTGGCTACTGGGGCCAGG
GGACAATGGTCACCGTCTCGAGT (SEQ ID NO: 272)
V_{L} with CDR1, CDR2 and CDR3 underlined
SYELTQPPSASGTPGQRVTISCSGSSSNIGSNTVTWYQQLPGTAPQLLFHNNDQRPSGVPDRFS
GSKSGTSGSLAISGLQSEDEADYYCSAWDDGLNAVIFGGGTKLTVL (SEQ ID NO: 273)
TCCTATGAGCTGACTCAGCCACCCTCAGCGTCTGGGACCCCCGGGCAGAGGGTCACCATC
TCTTGTTCTGGAAGCAGCTCCAACATCGGAAGTAATACTGTAACCTGGTACCAGCAGCTC
CCAGGAACGGCCCCCCAACTCCTCTTCCATAATAATGACCAGCGGCCCTCAGGGGTCCCT
GACCGATTCTCTGGCTCCAAGTCTGGCACCTCAGGCTCCCTGGCCATCAGTGGGCTGCAG
TCTGAGGATGAGGCTGATTATTACTGTTCAGCATGGGATGACGGCCTGAATGCTGTAATA
TTCGGCGGAGGGACCAAGCTGACCGTCCTA (SEQ ID NO: 274)
Her2_S1R3A1_DP47_11H6
V_{H} with CDR1, CDR2 and CDR3 underlined
EVQLLESGGGLVQPGGSLRLSCAASGFTFSSYAMSWVRQAPGKGLEWVSAISGSGGSTYYA
DSVKGRFTISRDNSKNTLYLQMNSLRAEDTAVYYCARDRVYDFWSGYYTRYNWFDPWGRG
TTVTVSS (SEQ ID NO: 275)
GAGGTGCAGCTGTTGGAGTCTGGGGGAGGCTTGGTACAGCCTGGGGGGTCCCTGAGACT
CTCCTGTGCAGCCTCTGGATTCACCTTTAGCAGCTATGCCATGAGCTGGGTCCGCCAGGC
TCCAGGGAAGGGGCTGGAGTGGGTCTCAGCTATTAGTGGTAGTGGTGGTAGCACATACT
ACGCAGACTCCGTGAAGGGCCGGTTCACCATCTCCAGAGACAATTCCAAGAACACGCTG
TATCTGCAAATGAACAGCCTGAGAGCCGAGGACACGGCCGTGTATTACTGTGCGAGAGA
TCGCGTTTACGATTTTTGGAGTGGTTATTATACGAGGTACAACTGGTTCGACCCCTGGGG
GCGAGGGACCACGGTCACCGTCTCGAGT (SEQ ID NO: 276)
V_{L} with CDR1, CDR2 and CDR3 underlined
QAVLTQPSSASGTPGQRVTISCSGSSSNIGSNYVYWYQQLPGTAPKLLIYRNNQRPSGVPDRF
SGSKSGTSASLAISGLRSEDEADYYCAAWDDSLSSPVFGGGTKVTVL (SEQ ID NO: 277)
CAGGCTGTGCTGACTCAGCCGTCCTCAGCGTCTGGGACCCCCGGGCAGAGGGTCACCATC
TCTTGTTCTGGAAGCAGCTCCAACATCGGAAGTAATTATGTATACTGGTACCAGCAGCTC
CCAGGAACGGCCCCCAAACTCCTCATCTATAGGAATAATCAGCGGCCCTCANGGGTCCCT
GACCGATTCTCTGGCTCCAAGTCTGGCACCTCAGCCTCCCTGGCCATCAGTGGGCTCCGG
TCCGAGGATGAGGCTGATTATTACTGTGCAGCATGGGATGACAGCCTGAGTAGTCCGGT
GTTCGGCGGAGGGACCAAGGTCACCGTCCTA (SEQ ID NO: 278)
Her2_S1R3A1_BMV_3B1
V_{H} with CDR1, CDR2 and CDR3 underlined
EVQLVQSGGGLVQPGGSLRLSCAASGFTFSSYPMHWVRQAPGKGLEWVAVVSFDGSKKYS
ADSVKGRFTISRDISKNTLYLQMNSLRAEDTAVYYCAKDRYDSGTFYYGMDVWGRGTLVT
VSS (SEQ ID NO: 279)
GAGGTGCAGCTGGTGCAGTCTGGGGGAGGCTTGGTACAGCCTGGGGGATCCCTGAGACT
CTCCTGTGCAGCCTCTGGATTCACCTTTAGCAGCTATCCCATGCACTGGGTCCGCCAGGC
TCCAGGCAAGGGGCTGGAGTGGGTGGCAGTTGTATCGTTCGATGGATCTAAGAAATACT
CTGCAGACTCCGTGAAGGGCCGATTCACCATCTCCAGAGACATCTCCAAGAACACGCTGT
ATCTGCAAATGAACAGCCTGAGAGCTGAGGACACGGCTGTATATTACTGTGCGAAAGAT
CGCTATGATTCGGGGACTTTCTACTACGGCATGGACGTCTGGGGCCGGGGCACCCTGGTC
ACCGTCTCGAGT (SEQ ID NO: 280)
V_{L} with CDR1, CDR2 and CDR3 underlined
QSALTQPASVSGSRGQSITISCTGTTGDVGGYDYVSWYQQHPGRAPKLLIYGNSNRPSGVPD
RFSASKSGNTASLTISGLQAEDEADYFCSTYAPPGIIMFGGGTKLTVL (SEQ ID NO: 281)
CAGTCTGCCCTGACTCAGCCTGCCTCCGTGTCTGGATCTCGTGGACAGTCGATCACCATC
TCCTGCACTGGAACCACTGGTGACGTTGGTGGTTATGACTATGTCTCCTGGTACCAACAG
CACCCAGGCAGAGCCCCCAAACTCCTCATCTATGGTAACAGCAATCGGCCCTCAGGGGT
CCCTGATCGCTTCTCTGCCTCCAAGTCCGGCAATACGGCCTCCCTGACCATCTCTGGACTC
CAGGCTGAGGATGAGGCTGATTATTTCTGCAGCACATATGCACCCCCCGGTATTATTATG
TTCGGCGGAGGGACCAAGCTGACCGTCCTA (SEQ ID NO: 282)
Her2_S1R3A1_DP47_6B9
V_{H} with CDR1, CDR2 and CDR3 underlined
EVQLLESGGGLVQPGGSLRLSCAASGFTFSSYAISWVRQAPGKGLEWVSAISGSGGSTYYAD
SVKGRFTISRDNSKNTLYLQMNSLRAEDTAVYYCARDSSRVGAYLVFDYWGRGTMVTVSS (SEQ ID NO: 283)
GAGGTGCAGCTGTTGGAGTCTGGGGGAGGCTTGGTACAGCCTGGGGGGTCCCTGAGACT
CTCCTGTGCAGCCTCTGGATTCACCTTTAGCAGCTATGCCATAAGCTGGGTCCGCCAGGC
TCCAGGGAAGGGGCTGGAGTGGGTCTCAGCTATTAGTGGTAGTGGTGGTAGCACATACT
ACGCAGACTCCGTGAAGGGCCGGTTCACCATCTCCAGAGACAATTCCAAGAACACGCTG
TATCTGCAAATGAACAGCCTGAGAGCCGAGGACACGGCCGTGTATTACTGTGCGAGAGA
TTCGAGTAGGGTGGGAGCTTATCTGGTGTTTGACTACTGGGGCCGGGGGACAATGGTCAC
CGTCTCGAGT (SEQ ID NO: 284)
V_{L} with CDR1, CDR2 and CDR3 underlined
QSVLTQPPSVSGAPGQRVTISCTGSSSNIGAGYDVHWYQQLPGTAPKLLIYGNSKRPSGVPDR
FSGSKSGTSASLALTGLQAEDEADYYCQSYDSSLSGYVFGTGTKVTVL (SEQ ID NO: 285)
CAGTCTGTGCTGACGCAGCCGCCCTCAGTGTCTGGGGCCCCAGGGCAGAGGGTCACCAT
CTCCTGCACTGGGAGCAGCTCCAACATCGGGGCAGGTTATGATGTACACTGGTACCAGC
AGCTTCCAGGAACAGCCCCCAAACTCCTCATCTATGGTAACAGCAAACGCCCCTCAGGG
GTCCCTGACCGATTCTCTGGCTCCAAGTCTGGCACCTCAGCCTCCCTGGCCCTCACTGGG
CTCCAGGCTGAGGATGAGGCTGATTATTACTGCCAGTCCTATGACAGCAGCCTGAGTGGT
TATGTCTTCGGAACTGGGACCAAGGTCACCGTCCTA (SEQ ID NO: 286)
Her2_S1R2A_CS_10B8
V_{H} with CDR1, CDR2 and CDR3 underlined
QMQLVQSGAEVKKPGASVKVSCKASGYTFTSYYIHWVRQAPGQGPEWMGIILPSGGSTSYA
QEFQGRLSMTRDTSTSTVYMELSDLRSDDTAIYYCARDYDRSAYLDIWGRGTMVTVSS (SEQ ID NO: 287)
CAGATGCAGCTGGTGCAGTCTGGGGCTGAGGTGAAGAAGCCTGGGGCCTCAGTGAAGGT
TTCCTGCAAGGCATCTGGATACACCTTCACCAGCTACTATATACACTGGGTGCGACAGGC
CCCTGGACAGGGCCCTGAGTGGATGGGAATAATCCTCCCTAGTGGTGGCAGCACCAGCT
ACGCACAGGAGTTCCAGGGCAGACTCTCCATGACCAGGGACACGTCCACGAGCACAGTG
TACATGGAGCTGAGCGACCTGAGATCTGACGACACGGCCATTTATTATTGTGCGAGAGA
CTATGATAGGAGTGCTTATCTTGATATCTGGGGCCGAGGGACAATGGTCACCGTCTCGAGT (SEQ ID NO: 288)
V_{L} with CDR1, CDR2 and CDR3 underlined
QSVLTQPPSASGTPGQRVTISCSGSSSNIGRNTVNWYKQFPGTAPKLLIYSDNKRPSGIPDRFS
GSKSGTSASLAISGLQSGDEADYYCAAWDDSLNGHVVFGGGTKLTVL (SEQ ID NO: 289)
CAGTCTGTGTTGACGCAGCCGCCCTCAGCGTCTGGGACCCCCGGGCAGAGGGTCACCATC
TCTTGTTCTGGAAGCAGCTCCAACATCGGAAGAAATACTGTAAACTGGTACAAGCAGTTC
CCAGGAACGGCCCCCAAACTCCTCATCTATAGTGATAATAAGCGGCCCTCAGGGATCCCT
GACCGATTCTCTGGCTCCAAGTCTGGCACCTCAGCCTCCCTGGCCATCAGTGGGCTCCAG
TCTGGGGATGAGGCTGATTATTACTGTGCCGCATGGGATGACAGCCTGAATGGCCATGTG
GTATTCGGCGGAGGGACCAAGCTGACCGTCCTA (SEQ ID NO: 290)
Her2_S1R3A1_DP47_7A6
V_{H} with CDR1, CDR2 and CDR3 underlined
EVQLLESGGGLVQPGGSLRLSCAASGFTFSSYAMSWVRQAPGKGLEWVSAISGSGGSTYYA
DSVKGRFTISRDNSKNTLYLQMNGLRVEDTAVYYCAKELVSRGSLTFDYWGKGTMVTVSS (SEQ ID NO: 291)
GAGGTGCAGCTGTTGGAGTCTGGGGGAGGCTTGGTACAGCCTGGGGGGTCCCTGAGACT
CTCCTGTGCAGCCTCTGGATTCACCTTTAGCAGCTATGCCATGAGCTGGGTCCGCCAGGC
TCCAGGGAAGGGGCTGGAGTGGGTCTCAGCTATTAGTGGTAGTGGTGGTAGCACATACT
ACGCAGACTCCGTGAAGGGCCGGTTCACCATCTCCAGAGACAATTCCAAGAACACGCTG
TATCTGCAAATGAACGGCCTGAGAGTCGAGGACACGGCCGTGTATTACTGTGCGAAAGA
ATTGGTCAGTAGAGGGAGCCTCACCTTTGACTACTGGGGCAAGGGGACAATGGTCACCG
TCTCGAGT (SEQ ID NO: 292)
V_{L} with CDR1, CDR2 and CDR3 underlined
QSVLTQPPSVSGAPGQGVTISCTGSSSNIGADFAVHWYQQLPGTAPKLLINGSSHRPSGVPDR
FSGSKSGPSASLAITGLQADDEADYFCQSYDYRLNALVFGGGTKLTVL (SEQ ID NO: 293)
CAGTCTGTGTTGACGCAGCCGCCCTCAGTGTCTGGGGCCCCAGGGCAGGGGGTCACCATC
TCCTGCACTGGGAGCAGCTCCAACATCGGGGCAGATTTTGCTGTACACTGGTACCAACAA
CTTCCAGGGACAGCCCCCAAACTCCTCATCAATGGTAGCAGCCATCGGCCCTCAGGGGTC
CCTGACCGATTCTCTGGCTCCAAGTCTGGCCCCTCAGCCTCCCTGGCCATCACTGGGCTCC
AAGCCGACGATGAGGCTGATTATTTTTGCCAGTCCTATGACTACAGACTCAATGCTTTAG
TGTTCGGCGGAGGGACCAAGCTGACCGTCCTA (SEQ ID NO: 294)
Her2_S1R3B2_DP47_2G3
V_{H} with CDR1, CDR2 and CDR3 underlined
EVQLLESGGGLVQPGGSLRLSCAASGFTFSSYAMSWVRQAPGKGLEWVSAISGSGGSTYYA
DSVKGRFTISRDNSKNTLYLQMNSLRAEDTAVYYCARGHKMGYFDYWGRGTLVTVSS (SEQ ID NO: 295)
GAGGTGCAGCTGTTGGAGTCTGGGGGAGGCTTGGTACAGCCTGGGGGGTCCCTGAGACT
CTCCTGTGCAGCCTCTGGATTCACCTTTAGCAGCTATGCCATGAGCTGGGTCCGCCAGGC
TCCAGGGAAGGGGCTGGAGTGGGTCTCAGCTATTAGTGGTAGTGGTGGTAGCACATACT
ACGCAGACTCCGTGAAGGGCCGGTTCACCATCTCCAGAGACAATTCCAAGAACACGCTG
TATCTGCAAATGAACAGCCTGAGAGCCGAGGACACGGCCGTGTATTACTGTGCGAGAGG
TCACAAAATGGGATACTTTGACTACTGGGGCCGGGGCACCCTGGTCACCGTCTCGAGT (SEQ ID NO: 296)
V_{L} with CDR1, CDR2 and CDR3 underlined
SSELTQDPAVSVALGQSVTITCRGASLSNYYASWYQQRPGQAPLLVVSDNNIRPSGIPDRFSG
SRSGTTASLSITGAQAEDEADYYCHSRASSDTHVRVFGGGTKLTVL (SEQ ID NO: 297)
TCTTCTGAGCTGACTCAGGACCCTGCTGTGTCCGTGGCCTTGGGACAGTCAGTCACCATC
ACGTGTCGGGGAGCCAGCCTCAGCAACTATTATGCAAGCTGGTACCAGCAGAGGCCAGG
ACAAGCCCCTCTACTTGTCGTCTCTGATAACAACATCCGGCCCTCAGGGATCCCAGACCG
ATTCTCTGGCTCCAGGTCAGGAACCACAGCTTCCTTGAGCATCACTGGGGCTCAGGCGGA
AGATGAGGCTGACTATTACTGTCACTCCCGTGCCAGCAGTGACACCCATGTCCGGGTGTT
TGGCGGCGGGACCAAGCTGACCGTCCTA (SEQ ID NO: 298)
Her2_S1R2B_CS_6H11
V_{H} with CDR1, CDR2 and CDR3 underlined
EVQLVQSGAEVKQPGESLKISCKGSGYSFSNYWIGWVRQMPGKGLEWMGIIYPDDSDTRYSP
SFQGQVTISADRSISTAYLQWSSLKASDTATYYCARGNVINGNTNAFDIWGRGTTVTVSS (SEQ ID NO: 299)
GAGGTGCAGCTGGTGCAGTCTGGGGCAGAGGTGAAACAGCCCGGGGAGTCTCTGAAGAT
CTCCTGTAAGGGTTCTGGATACAGCTTTAGCAACTACTGGATCGGCTGGGTGCGCCAGAT
GCCCGGGAAAGGCCTGGAGTGGATGGGGATCATCTATCCTGATGACTCTGATACCAGAT
ACAGCCCGTCCTTCCAAGGCCAGGTCACCATCTCAGCCGACAGGTCCATCAGCACCGCCT
ACCTGCAGTGGAGCAGCCTGAAGGCCTCGGACACCGCCACGTATTACTGTGCGAGAGGA
AATGTTATAAATGGAAATACCAATGCTTTTGATATCTGGGGGCGGGGGACCACGGTCAC
CGTCTCGAGT (SEQ ID NO: 300)
V_{L} with CDR1, CDR2 and CDR3 underlined
QAVVIQEPSFSVSPGGTVTLTCGLSSGSVSTGYYPSWYQQTPGQAPRTLIYNTNSRSSGVPDR
FSGSILGNKAALTITGAQADDESDYYCVLYMGSGISVFGGGTKLTVL (SEQ ID NO: 301)
CAGGCTGTGGTGATCCAGGAGCCATCGTTCTCAGTGTCCCCTGGAGGGACAGTCACACTC
ACTTGTGGCTTGAGCTCTGGCTCAGTCTCTACTGGTTACTACCCCAGCTGGTACCAGCAG
ACCCCAGGCCAGGCTCCACGCACGCTCATCTACAACACAAACAGTCGCTCTTCTGGGGTC
CCTGATCGCTTCTCTGGCTCCATCCTTGGGAACAAAGCTGCCCTCACCATCACGGGGGCC
CAGGCAGATGATGAATCTGATTATTACTGTGTGCTGTATATGGGTAGTGGCATTTCGGTA
TTCGGCGGAGGGACCAAGCTGACCGTCCTA (SEQ ID NO: 302)
Her2_S1R3A1_DP47_10G1
V_{H} with CDR1, CDR2 and CDR3 underlined
EVQLLESGGGLVQPGGSLRLSCAASGFTFSSYAMSWVRQAPGKGLEWVSAISGSGGSTYYA
DSVKGRFTISRDNSKNTLYLQMNSLRAEDTAVYYCAGGRVGSTAAFDTWGQGTMVTVSS (SEQ ID NO: 303)
GAGGTGCAGCTGTTGGAGTCTGGGGGAGGCTTGGTACAGCCTGGGGGGTCCCTGAGACT
CTCCTGTGCAGCCTCTGGATTCACCTTTAGCAGCTATGCCATGAGCTGGGTCCGCCAGGC
TCCAGGGAAGGGGCTGGAGTGGGTCTCAGCTATTAGTGGTAGTGGTGGTAGCACATACT
ACGCAGACTCCGTGAAGGGCCGGTTCACCATCTCCAGAGACAATTCCAAGAACACGCTG
TATCTGCAAATGAACAGCCTGAGAGCCGAGGACACGGCCGTGTATTACTGTGCGGGAGG
TAGAGTGGGATCTACGGCGGCTTTTGATACATGGGGCCAGGGGACAATGGTCACCGTCT
CGAGT (SEQ ID NO: 304)
V_{L} with CDR1, CDR2 and CDR3 underlined
QSVLTQPPSVSGAPGQRVAISCTGSSSNIGAGYDVHWFQQLPGTAPKLLIFGNKNRPSGVPDR
FSASKSGTAASLAITGLQAEDEGDYYCQSYDSSLSGVIFGRGTKLTVL (SEQ ID NO: 305)
CAGTCTGTGTTAACGCAGCCGCCCTCAGTGTCTGGGGCCCCAGGGCAGAGGGTCGCCAT
ATCCTGTACGGGGAGCAGCTCCAATATTGGGGCAGGTTATGATGTACACTGGTTTCAGCA
ACTTCCAGGAACAGCCCCCAAACTCCTCATCTTTGGTAACAAGAATCGGCCCTCAGGGGT
CCCCGACCGATTCTCTGCCTCTAAGTCTGGCACCGCAGCCTCCCTGGCCATCACTGGGCT
CCAGGCTGAGGATGAGGGTGATTATTACTGCCAGTCCTATGACAGCAGCCTGAGTGGTGT
GATCTTCGGCAGAGGGACCAAGCTGACCGTCCTA (SEQ ID NO: 306)
Her2_S1R3A1_DP47_7C1
V_{H} with CDR1, CDR2 and CDR3 underlined
EVQLLESGGGLVQPGGSLRLSCAASGFTFSSYAMSWVRQAPGKGLEWVSAISGSGGSTYSAD
SVKGRFTISRDNSKNTLYLQMNSLRAEDTAVYYCAGGRVGSTAAFDTWGRGTTVTVSS (SEQ ID NO: 307)
GAGGTGCAGCTGTTGGAGTCTGGGGGAGGCTTGGTACAGCCTGGGGGGTCCCTGAGACT
CTCCTGTGCAGCCTCTGGATTCACCTTTAGCAGCTATGCCATGAGCTGGGTCCGCCAGGC
TCCAGGGAAGGGGCTGGAGTGGGTCTCAGCTATTAGTGGTAGTGGTGGTAGCACATACT
CCGCAGACTCCGTGAAGGGCCGGTTCACCATCTCCAGAGACAACTCCAAGAACACGCTG
TATCTGCAAATGAACAGCCTGAGAGCCGAGGACACGGCCGTGTATTACTGTGCGGGAGG
TAGAGTGGGATCTACGGCGGCTTTTGATACATGGGGGCGAGGGACCACGGTCACCGTCT
CGAGT (SEQ ID NO: 308)
V_{L} with CDR1, CDR2 and CDR3 underlined
QAVLTQPSSVSGAPGQRVTISCTGSSSNIGAGYDVHWYQQLPGTAPKLLIYGNSNRPSGVPDR
FSGSKSGTSASLAITGLQAEDEADYYCQSYDSSLRGYVFGTGTKLTVL (SEQ ID NO: 309)
CAGGCTGTGCTGACTCAGCCGTCCTCAGTGTCTGGGGCCCCAGGGCAGAGGGTCACCATC
TCCTGCACTGGGAGCAGCTCCAACATCGGGGCAGGTTATGATGTACACTGGTACCAGCA
GCTTCCAGGAACAGCCCCCAAACTCCTCATCTATGGTAACAGCAATCGGCCCTCAGGGGT
CCCTGACCGATTCTCTGGCTCCAAGTCTGGCACCTCAGCCTCCCTGGCCATCACTGGGCT
CCAGGCTGAGGATGAGGCTGATTATTACTGCCAGTCCTATGACAGCAGCCTGCGTGGTTA
TGTCTTCGGAACTGGGACCAAGCTGACCGTCCTA (SEQ ID NO: 310)
Her2_S1R2A_DP47_5D6
V_{H} with CDR1, CDR2 and CDR3 underlined
EVQLLESGGGLVQPGGSLRLSCAASGFTFSSYAMSWVRQAPGKGLEWVSAISGSGGSTYYA
DSVKGRFTISRDNSKNTLYLQMNSLRAEDTAVYYCARGSRVGTIWGSLDDWGKGTMVTVSS (SEQ ID NO: 311)
GAGGTGCAGCTGTTGGAGTCTGGGGGAGGCTTGGTACAGCCTGGGGGGTCCCTGAGACT
CTCCTGTGCAGCCTCTGGATTCACCTTTAGCAGCTATGCCATGAGCTGGGTCCGCCAGGC
TCCAGGGAAGGGGCTGGAGTGGGTCTCAGCTATTAGTGGTAGTGGTGGTAGCACATACT
ACGCAGACTCCGTGAAGGGCCGGTTCACCATCTCCAGAGACAATTCCAAGAACACGCTG
TATCTGCAAATGAACAGCCTGAGAGCCGAGGACACGGCCGTGTATTACTGTGCGAGAGG
CAGTAGAGTGGGGACGATTTGGGGAAGCCTTGACGACTGGGGCAAAGGGACAATGGTCA
CCGTCTCGAGT (SEQ ID NO: 312)
V_{L} with CDR1, CDR2 and CDR3 underlined
ETTLTQSPGTLSLSPGERATLSCRASQSSSSSYLAWYQQKPGQAPRLLIYAASSRATGVPDRFS
GSGSGTDFTLTISRLEPEDFAVYYCQQYGSSRFTFGQGTRLEIKR (SEQ ID NO: 313)
GAAACGACACTCACGCAGTCTCCAGGCACCCTGTCTTTGTCTCCAGGGGAAAGAGCCAC
CCTCTCCTGCAGGGCCAGTCAGAGTAGTAGCAGCAGCTACTTAGCCTGGTACCAGCAGA
AACCTGGCCAGGCTCCCAGGCTCCTCATCTATGCTGCATCCAGCAGGGCCACTGGCGTCC
CAGACAGGTTCAGTGGCAGTGGGTCTGGGACAGACTTCACTCTCACCATCAGCAGACTG
GAGCCTGAAGATTTTGCAGTGTATTACTGTCAGCAGTATGGTAGCTCACGGTTCACCTTC
GGCCAAGGGACACGACTGGAGATTAAACGT (SEQ ID NO: 314)
Her2_S1R3A1_DP47_11F6
V_{H} with CDR1, CDR2 and CDR3 underlined
EVQLLESGGGLVQPGGSLRLSCAASGFTFSSYAMSWVRQAPGKGLEWVSAISGSGGSTYYA
DSVKGRFTISRDNSKNTLYLQMNSLRAEDTAVYYCGRGSRVGTIWGSLDFWGQGTMVTVSS (SEQ ID NO: 315)
GAGGTGCAGCTGTTGGAGTCTGGGGGAGGCTTGGTACAGCCTGGGGGGTCCCTGAGACT
CTCCTGTGCAGCCTCTGGATTCACCTTTAGCAGCTATGCCATGAGCTGGGTCCGCCAGGC
TCCAGGGAAGGGGCTGGAGTGGGTCTCAGCTATTAGTGGTAGTGGTGGTAGCACATACT
ACGCAGACTCCGTGAAGGGCCGGTTCACCATCTCCAGAGACAATTCCAAGAACACGCTG
TATCTGCAAATGAACAGCCTGAGAGCCGAGGACACGGCCGTGTATTACTGTGGGAGAGG
CAGCAGAGTGGGGACGATTTGGGGAAGCCTTGACTTTTGGGGCCAAGGGACAATGGTCA
CCGTCTCGAGT (SEQ ID NO: 316)
V_{L} with CDR1, CDR2 and CDR3 underlined
QSVLTQPPSVSAAPGQRVTISCSGKSSNIGGNSVAWYQQLPGTAPKVLIYDNDKRPSGVPDRF
SGSKSGTSATLGITGLQTGDEADYYCGSWDSSLGVGMFGGGTKVTVL (SEQ ID NO: 317)
CAGTCTGTGCTGACGCAGCCGCCCTCAGTGTCTGCGGCCCCGGGACAGAGGGTCACCATC
TCCTGCTCTGGAAAGAGCTCCAACATTGGCGGTAATTCTGTGGCCTGGTACCAGCAACTC
CCGGGAACAGCCCCCAAAGTCCTCATTTATGACAATGATAAGCGACCCTCAGGGGTTCCT
GACCGATTCTCTGGCTCCAAGTCTGGCACGTCAGCCACCCTGGGCATCACCGGACTGCAG
ACTGGGGACGAGGCCGATTATTACTGCGGATCCTGGGATAGCAGCCTGGGTGTTGGGAT
GTTCGGCGGAGGGACCAAGGTCACCGTCCTA (SEQ ID NO: 318)
Her2_S1R3A1_DP47_11D3
V_{H} with CDR1, CDR2 and CDR3 underlined
EVQLLESGGGLVQPGGSLRLSCAASGFTFSSYAMSWVRQAPGKGLEWVSAISGSGGSTYYA
DSVKGRFTISRDNSKNTLYLQMNSLRAEDTAVYYCARGYSGSSFDAWGQGTMVTVSS (SEQ ID NO: 319)
GAGGTGCAGCTGTTGGAGTCTGGGGGAGGCTTGGTACAGCCTGGGGGGTCCCTGAGACT
CTCCTGTGCAGCCTCTGGATTCACCTTTAGCAGCTATGCCATGAGCTGGGTCCGCCAGGC
TCCAGGGAAGGGGCTGGAGTGGGTCTCAGCTATTAGTGGTAGTGGTGGTAGCACATACT
ACGCAGACTCCGTGAAGGGCCGGTTCACCATCTCCAGAGACAATTCCAAGAACACGCTG
TATCTGCAAATGAACAGCCTGAGAGCCGAGGACACGGCCGTGTATTACTGTGCGAGGGG
CTACAGTGGAAGTTCCTTTGACGCCTGGGGCCAAGGGACAATGGTCACCGTCTCGAGT (SEQ ID NO: 320)
V_{L} with CDR1, CDR2 and CDR3 underlined
QSVLTQPPSASGTPGQRVTISCSGSSSNIGSKSVYWYQQLPGAAPKLLIYRNSQRPSGVPDRFS
ASKSGTSASLAISGLRSEDEADYYCAAWDGSLSGHFFGTGTKLTVL (SEQ ID NO: 321)
CAGTCTGTGTTGACGCAGCCGCCATCAGCGTCCGGGACCCCCGGGCAGAGGGTCACCAT
CTCTTGTTCTGGAAGCAGCTCCAATATCGGAAGTAAGTCTGTATACTGGTACCAGCAACT
CCCAGGAGCGGCCCCCAAACTCCTCATCTACAGGAATAGTCAGCGGCCCTCAGGGGTCC
CTGACCGATTCTCTGCCTCCAAGTCTGGCACCTCTGCCTCCCTGGCCATCAGTGGGCTCCG
GTCCGAGGATGAGGCTGACTATTACTGTGCAGCATGGGATGGCAGCCTGAGTGGACATT
TCTTCGGAACTGGGACCAAGCTGACCGTCCTA (SEQ ID NO: 322)
Her2_S1R3A1_CS_8A8
V_{H} with CDR1, CDR2 and CDR3 underlined
EVQLVQSGAEVKKPGESLKISCKGSGYSFTSYWIGWVRQMPGKGLEWMGIIYPGDSDTRYSP
SFQGQVTISADKSISTAYLQWSSLKASDTAMFYCARLNDSSGYTTNFDYWGQGTLVTVSS (SEQ ID NO: 323)
GAGGTGCAGCTGGTGCAGTCTGGGGCAGAGGTGAAAAAGCCCGGGGAGTCTCTGAAGAT
CTCCTGTAAGGGCTCTGGATACAGCTTTACCAGCTATTGGATCGGCTGGGTGCGCCAGAT
GCCCGGGAAAGGCCTGGAGTGGATGGGGATCATCTATCCTGGTGACTCTGATACCAGAT
ACAGCCCGTCCTTCCAAGGCCAGGTCACCATCTCAGCCGACAAGTCCATCAGCACCGCCT
ACCTGCAGTGGAGCAGCCTGAAGGCCTCGGACACCGCCATGTTTTACTGTGCGAGACTCA
ATGATAGTAGTGGTTATACGACTAACTTTGACTACTGGGGCCAAGGCACCCTGGTCACCG
TCTCGAGT (SEQ ID NO: 324)
V_{L} with CDR1, CDR2 and CDR3 underlined
QAVVIQEPSFSVSPGGTVTLTCGLSSGSVSTRYNPSWYQQTPGQAPRTLIYSTNTRSSGVPDRF
SGSILGNKAALTITGAQADDESDYYCALYMGSGIWVFGGGTKLTVL (SEQ ID NO: 325)
CAGGCTGTGGTGATCCAGGAGCCATCGTTCTCAGTGTCCCCTGGAGGGACAGTCACACTC
ACTTGTGGCTTGAGCTCTGGCTCAGTCTCTACTCGTTACAACCCCAGCTGGTACCAGCAG
ACCCCAGGCCAGGCTCCACGCACGCTCATCTACAGTACAAACACTCGTTCTTCTGGGGTC
CCTGACCGCTTCTCTGGCTCCATCCTTGGGAACAAAGCTGCCCTCACCATCACGGGGGCC
CAGGCAGATGATGAATCTGATTATTACTGTGCGCTGTATATGGGTAGTGGCATTTGGGTG
TTCGGCGGAGGGACCAAGCTGACCGTCCTA (SEQ ID NO: 326)
Her2_S1R3A1_BMV_5D10
V_{H} with CDR1, CDR2 and CDR3 underlined
EVQLVESGGGLVQPGGSLRLSCAASGFTFDSYAMSWVRQAPGKGLEWVSIISGRDGYTYYT
DSVKGRFTISRDNSKNTVYLQMNSLRAEDTGVYYCARNGEWPGILDYWGRGTMVTVSS (SEQ ID NO: 327)
GAGGTGCAGCTGGTGGAGTCTGGGGGAGGCTTGGTACAGCCTGGGGGGTCCCTGAGACT
CTCCTGTGCTGCCTCTGGATTCACCTTTGACAGCTATGCCATGAGCTGGGTCCGCCAGGC
TCCAGGGAAGGGGCTGGAGTGGGTCTCAATTATTAGTGGTAGAGATGGTTACACATACT
ACACAGACTCCGTGAAGGGTCGGTTCACCATCTCCAGAGACAATTCCAAGAACACGGTG
TATCTGCAAATGAACAGCCTGAGAGCCGAGGACACGGGTGTGTATTATTGTGCGAGAAA
TGGGGAGTGGCCCGGAATCTTAGACTACTGGGGCAGGGGGACAATGGTCACCGTCTCCT
CA (SEQ ID NO: 328)
V_{L} with CDR1, CDR2 and CDR3 underlined
DIQMTQSPSTLSASIGDRVTITCRASEGIYHWLAWYQQKPGKAPKLLIYKASSLASGAPSRFS
GSGSGTDFTLTISSLQPDDFATYYCQQYSNYPLTFGGGTKLEIKR (SEQ ID NO: 329)
GACATCCAGATGACCCAGTCTCCTTCCACCCTGTCTGCATCTATTGGAGACAGAGTCACC
ATCACCTGCCGGGCCAGTGAGGGTATTTATCACTGGTTGGCCTGGTATCAGCAGAAGCCA
GGGAAAGCCCCTAAACTCCTGATCTATAAGGCCTCTAGTTTAGCCAGTGGGGCCCCATCA
AGGTTCAGCGGCAGTGGATCTGGGACAGATTTCACTCTCACCATCAGCAGCCTGCAGCCT
GATGATTTTGCAACTTATTACTGCCAACAATATAGTAATTATCCGCTCACTTTCGGCGGA
GGGACCAAGCTGGAGATCAAACGT (SEQ ID NO: 330)
Her2_S1R3A1_DP47_11C1
V_{H} with CDR1, CDR2 and CDR3 underlined
EVQLLESGGGLVQPGGSLRLSCAASGFTFSSYAMSWVRQAPGKGLEWVSAISGSGGSTYYA
DSVKGRFTISRDNSKNTLYLQMNSLRAEDTAVYYCAASNSYYYFDYWGQGTLVTVSS (SEQ ID NO: 331)
GAGGTGCAGCTGTTGGAGTCTGGGGGAGGCTTGGTACAGCCTGGGGGGTCCCTGAGACT
CTCCTGTGCAGCCTCTGGATTCACCTTTAGCAGCTATGCCATGAGCTGGGTCCGCCAGGC
TCCAGGGAAGGGGCTGGAGTGGGTCTCAGCTATTAGTGGTAGTGGTGGTAGCACATACT
ACGCAGACTCCGTGAAGGGCCGGTTCACCATCTCCAGAGACAATTCCAAGAACACGCTG
TATCTGCAAATGAACAGCCTGAGAGCCGAGGACACGGCCGTGTATTACTGTGCGGCGAG
TAATAGTTATTACTACTTTGACTACTGGGGCCAGGGAACCCTGGTCACCGTCTCGAGT (SEQ ID NO: 332)
V_{L} with CDR1, CDR2 and CDR3 underlined
SSELTQDPAVSVALGQTVRITCQGDSLRNFYPSWYQQKPGQAPVLVIYGKNIRPSGIPDRFSG
SGSGSTASLTITGAQAEDEADYYCNSRDSSGKHMGVVFGGGTKLTVL (SEQ ID NO: 333)
TCTTCTGAGCTGACTCAGGACCCTGCTGTGTCTGTGGCCTTGGGACAGACAGTCAGGATC
ACATGCCAAGGAGACAGCCTCAGAAACTTTTATCCAAGTTGGTATCAGCAGAAGCCAGG
ACAGGCCCCTGTTCTTGTCATTTATGGTAAAAATATTCGGCCCTCAGGGATCCCAGACCG
ATTCTCTGGCTCCGGCTCAGGAAGCACAGCTTCCTTGACCATCACTGGGGCTCAGGCGGA
AGATGAGGCTGACTATTACTGTAACTCCCGGGACAGCAGTGGTAAACATATGGGGGTGG
TATTCGGCGGAGGGACCAAGCTGACCGTCCTA (SEQ ID NO: 334)
Her2_S1R3A1_DP47_4E1
V_{H} with CDR1, CDR2 and CDR3 underlined
EVQLLESGGGLVQPGGSLRLSCAASGFTFSSYAMSWVRQAPGKGLEWVSAISGSGGSTYYA
DSVKGRFTISRDNSKNTLYLQMNSLRAEDMAVYYCARTPGYSSGWYSVWGRGTLVTVSS (SEQ ID NO: 335)
GAGGTGCAGCTGTTGGAGTCTGGGGGAGGCTTGGTACAGCCTGGGGGGTCCCTGAGACT
CTCCTGTGCAGCCTCTGGATTCACCTTTAGCAGCTATGCCATGAGCTGGGTCCGCCAGGC
TCCAGGGAAGGGGCTGGAGTGGGTCTCAGCTATTAGTGGTAGTGGTGGTAGCACATACT
ACGCAGACTCCGTGAAGGGCCGGTTCACCATCTCCAGAGACAATTCCAAGAACACGCTG
TATCTGCAAATGAACAGCCTGAGAGCCGAGGACATGGCCGTGTATTACTGTGCGAGGAC
TCCCGGGTATAGCAGTGGCTGGTACTCGGTTTGGGGCCGGGGCACCCTGGTCACCGTCTC
GAGT (SEQ ID NO: 336)
V_{L} with CDR1, CDR2 and CDR3 underlined
QSVVTQPPSVSGAPGQRVTISCTGSSSNIGAGYDVHWYQQVPGTAPKLLIYGNNNRPSGVPD
RFSGSKSGTSASLAITGLQPEDEVDYYCQSYDRSLSGYIFGSGTKVTVL (SEQ ID NO: 337)
CAGTCTGTCGTGACGCAGCCGCCCTCAGTGTCTGGGGCCCCAGGGCAGAGGGTCACCAT
CTCCTGTACTGGGAGCAGCTCCAACATCGGGGCAGGGTATGATGTTCACTGGTACCAGCA
GGTTCCAGGAACAGCCCCCAAACTCCTCATCTATGGTAACAACAATCGGCCCTCGGGGGT
CCCTGACCGATTCTCTGGCTCCAAGTCTGGCACCTCAGCCTCCCTGGCCATCACTGGGCT
CCAGCCTGAGGATGAAGTTGATTATTACTGCCAGTCCTATGACCGCAGCCTGAGTGGTTA
TATCTTCGGAAGTGGGACCAAGGTCACCGTCCTA (SEQ ID NO: 338)
Her2_S1R3A1_DP47_10E1
V_{H} with CDR1, CDR2 and CDR3 underlined
EVQLLESGGGLVQPGGSLRLSCAASGFTFSSYAMSWVRQAPGKGLEWVSAISGSGGSTYYA
DSVKGRFTISRDNSKNTLYLQMNSLRAEDTAVYYCARVGSFGDYKDKSGYGFYFDYWGQG
TLVTVSS (SEQ ID NO: 339)
GAGGTGCAGCTGTTGGAGTCTGGGGGAGGCTTGGTACAGCCTGGGGGGTCCCTGAGACT
CTCCTGTGCAGCCTCTGGATTCACCTTTAGCAGCTATGCCATGAGCTGGGTCCGCCAGGC
TCCAGGGAAGGGGCTGGAGTGGGTCTCAGCTATTAGTGGTAGTGGTGGTAGCACATACT
ACGCAGACTCCGTGAAGGGCCGGTTCACCATCTCCAGAGACAATTCCAAGAACACGCTG
TATCTGCAAATGAACAGCCTGAGAGCCGAGGACACGGCCGTGTATTACTGTGCGAGAGT
TGGGTCGTTTGGTGATTACAAAGATAAAAGTGGTTACGGCTTCTACTTTGACTACTGGGG
CCAAGGCACCCTGGTCACCGTCTCGAGT (SEQ ID NO: 340)
V_{L} with CDR1, CDR2 and CDR3 underlined
QSVLTQPPSASGTLGQTVFISCSGSSSNIGSNSVSWYQQLPGTAPKFLIYHNNQRPSGVPERFS
GSKSGTSASLAIRGLQSEDEADYYCASWEDSLNGWVFGGGTKLTVL (SEQ ID NO: 341)
CAGTCTGTGCTGACTCAGCCACCCTCGGCGTCTGGGACCCTCGGGCAGACGGTCTTCATC
TCTTGTTCTGGAAGCAGTTCCAACATCGGAAGTAATTCTGTGAGTTGGTACCAGCAGCTC
CCAGGAACGGCCCCCAAATTTCTCATTTATCATAATAATCAGCGGCCCTCAGGGGTCCCT
GAGCGATTCTCTGGCTCCAAGTCTGGCACCTCAGCCTCCCTGGCCATCCGTGGGCTCCAG
TCTGAGGATGAGGCTGATTACTACTGTGCATCTTGGGAGGACAGCCTGAATGGTTGGGTG
TTCGGCGGGGGGACCAAGCTGACCGTCCTA (SEQ ID NO: 342)
Her2_S1R3A1_CS_11C3
V_{H} with CDR1, CDR2 and CDR3 underlined
QVQLVQSGAEVKKPGASVKVSCKASGYTFTSYGISWVRQAPGQGLEWMGWISAYNGNTNY
AQKLQGRVTMTFTTDTSTSTAYMELRSLRSDDTAVYYCARVGSGYCSGGSCYVGWFDPWGRG
TMVTVSS (SEQ ID NO: 343)
CAGGTCCAGCTGGTGCAGTCTGGGGCTGAGGTGAAGAAGCCTGGGGCCTCAGTGAAGGT
CTCCTGCAAGGCTTCTGGTTACACCTTTACCAGCTATGGTATCAGCTGGGTGCGACAGGC
CCCTGGACAAGGGCTTGAGTGGATGGGATGGATCAGCGCTTACAATGGTAACACAAACT
ATGCACAGAAGCTCCAGGGCAGAGTCACCATGACCACAGACACATCCACGAGCACAGCC
TACATGGAGCTGAGGAGCCTGAGATCTGACGACACGGCCGTGTATTACTGTGCGAGAGT
GGGGTCGGGATATTGTAGTGGTGGTAGCTGCTACGTGGGCTGGTTCGACCCCTGGGGCCG
GGGGACAATGGTCACCGTCTCGAGT (SEQ ID NO: 344)
V_{L} with CDR1, CDR2 and CDR3 underlined
SSELTQDPAVSVALGQTVKITCQGDSLSAYYATWYQQKPGQAPVLVIYGKNKRPSGIPDRFS
GSKSGNTASLTITGAQAEDEADYYCNSRDSSGNDHYVFGTGTKLTVL (SEQ ID NO: 345)
TCTTCTGAGCTGACTCAGGACCCTGCTGTGTCTGTGGCCTTGGGACAGACAGTCAAGATC
ACATGCCAAGGAGACAGCCTCAGTGCCTATTATGCAACCTGGTACCAGCAGAAGCCAGG
CCAGGCCCCTGTACTTGTCATCTATGGTAAAAACAAGCGGCCGTCCGGGATCCCAGACCG
ATTCTCTGGCTCCAAGTCAGGAAACACAGCTTCCTTGACCATCACGGGGGCTCAGGCGGA
AGATGAGGCTGACTATTACTGTAACTCCCGGGACAGCAGTGGTAATGATCATTATGTCTT
CGGAACTGGGACCAAGCTGACCGTTCTA (SEQ ID NO: 346)
Her2_S1R3A1_CS_13H11
V_{H} with CDR1, CDR2 and CDR3 underlined
EVQLVQSGAEVRKPGASVKVSCRASGYNFKDYYLHWVRQAPGEGLEWMGWINPHAGTTK
YAQNFQHRIIMTRDTTITTAYMELSSLKSDDTAIYFCTRYYFDSSGYFRFDPWGQGTMVTVSS (SEQ ID NO: 347)
GAGGTCCAGCTGGTACAGTCTGGGGCTGAGGTGAGGAAGCCTGGGGCCTCAGTCAAGGT
CTCCTGCAGGGCTTCTGGATACAACTTCAAAGACTACTATTTGCACTGGGTGCGCCAGGC
CCCTGGAGAAGGGCTTGAGTGGATGGGGTGGATCAACCCTCACGCTGGTACCACAAAAT
ATGCACAGAATTTTCAGCACAGGATTATTATGACCAGGGACACGACCATCACCACAGCC
TACATGGAACTGAGCAGTCTGAAATCTGACGACACAGCCATTTATTTCTGTACCAGATAC
TACTTTGACAGTAGTGGTTATTTTAGGTTCGACCCCTGGGGCCAAGGGACAATGGTCACC
GTCTCGAGT (SEQ ID NO: 348)
V_{L} with CDR1, CDR2 and CDR3 underlined
QSVVTQPPSVSGAPGQKVTISCSGSSSNIGNNYVSWYQQLPGTAPKLLIYDNNKRPSGIPDRFS
GSKSGTSATLGITGLQTGDEADYYCGTWDSSLSAGVFGGGTKVTVL (SEQ ID NO: 349)
CAGTCTGTCGTGACGCAGCCGCCCTCAGTGTCTGGGGCCCCAGGACAGAAGGTCACCAT
CTCCTGCTCTGGAAGCAGCTCCAACATTGGGAATAATTATGTATCCTGGTACCAGCAGCT
CCCAGGAACAGCCCCCAAACTCCTCATTTATGACAATAATAAGCGACCCTCAGGGATTCC
TGACCGATTCTCTGGCTCCAAGTCTGGCACGTCAGCCACCCTGGGCATCACCGGACTCCA
GACTGGGGACGAGGCCGATTATTACTGCGGAACATGGGATAGCAGCCTGAGTGCTGGGG
TGTTCGGCGGAGGGACCAAGGTCACCGTCCTA (SEQ ID NO: 350)
Her2_S1R3A1_CS_2D9
V_{H} with CDR1, CDR2 and CDR3 underlined
QMQLVQSGAEVKKPGESLKMSCKGSGYSFTSYWIGWVRQMPGKGLEWMGIIYPGNSDTRY
NPSFEGQVTISADKSINTAFLQWNSLKASDTAIYYCARAPWVGAFDTWGQGTMVTVSS (SEQ ID NO: 351)
CAGATGCAGCTGGTGCAGTCTGGGGCAGAGGTGAAAAAGCCCGGGGAGTCTCTGAAGAT
GTCCTGTAAGGGTTCTGGATACAGCTTTACCAGCTACTGGATCGGCTGGGTGCGCCAGAT
GCCCGGGAAAGGCCTGGAGTGGATGGGGATCATCTATCCTGGTAACTCCGATACCAGAT
ACAACCCGTCCTTCGAAGGCCAGGTCACCATCTCAGCCGACAAGTCCATCAACACCGCCT
TCCTGCAGTGGAACAGCCTGAAGGCCTCGGACACCGCCATATATTATTGTGCGCGGGCTC
CCTGGGTGGGTGCTTTTGATACTTGGGGCCAGGGGACAATGGTCACCGTCTCTTCA (SEQ ID NO: 352)
V_{L} with CDR1, CDR2 and CDR3 underlined
DIVMTQSPSTLSASVGDRVTITCRASQGISSWLAWYQQKPGRAPKVLIYKASTLESGVPSRFS
GSGSGTDFTLTISSLQPEDFATYYCQQSYSTPWTFGQGTKLEIKR (SEQ ID NO: 353)
GACATCGTGATGACCCAGTCTCCTTCCACCCTGTCTGCATCTGTAGGAGACAGAGTCACC
ATCACTTGCCGGGCCAGTCAGGGTATTAGTAGCTGGTTGGCCTGGTATCAGCAGAAACCA
GGGAGAGCCCCTAAGGTCTTGATCTATAAGGCATCTACTTTAGAAAGTGGGGTCCCATCA
AGGTTCAGCGGCAGTGGATCTGGGACAGATTTCACTCTCACCATCAGCAGTCTGCAACCT
GAAGATTTTGCAACTTACTACTGTCAACAGAGTTACAGTACCCCGTGGACGTTCGGCCAA
GGGACCAAGCTGGAGATCAAACGT (SEQ ID NO: 354)
Her2_S1R2A_CS_3D4
V_{H} with CDR1, CDR2 and CDR3 underlined
QMQLVQSGAEVKKPGASVKVSCKSSGYTFKDYYINWVRQAPGQGLEWVGWINPKNGITKY
SQNFQGRVSMTTDTSISTVYMDLRGLTSDDTAVYYCARDANRLRVGWFDPWGQGTLVTVSS (SEQ ID NO: 355)
CAGATGCAGCTGGTGCAGTCTGGGGCTGAGGTGAAGAAGCCAGGGGCCTCAGTGAAAGT
CTCCTGCAAGTCTTCTGGATACACCTTCAAGGACTACTATATCAACTGGGTGCGACAGGC
CCCTGGACAAGGGCTTGAGTGGGTGGGATGGATCAACCCTAAAAATGGTATCACAAAAT
ATTCGCAGAATTTTCAGGGCAGGGTCTCCATGACCACGGATACGTCCATCAGCACAGTCT
ACATGGACCTGAGAGGTCTGACATCTGACGACACGGCCGTTTATTATTGTGCGAGAGAC
GCGAACCGCCTTAGGGTGGGCTGGTTCGACCCCTGGGGCCAAGGAACCCTGGTCACCGT
CTCGAGT (SEQ ID NO: 356)
V_{L} with CDR1, CDR2 and CDR3 underlined
QAVLTQPSSVSGSPGQRVSISCTGSSSNIGAGYDVHWYQQLPGTAPKLLIYGNINRPSGVPDR
FSGSKSGTSASLAITGLQAEDEADYYCQSYDSSLRAAVFGGGTKVTVL (SEQ ID NO: 357)
CAGGCTGTGCTGACTCAGCCGTCCTCAGTGTCTGGGTCCCCAGGGCAGAGGGTCAGCATC
TCCTGCACTGGGAGCAGCTCCAACATCGGGGCAGGTTATGATGTACATTGGTATCAACAA
CTTCCAGGAACAGCCCCCAAACTCCTCATCTACGGTAACATCAATCGGCCCTCAGGGGTC
CCTGACCGATTCTCTGGCTCCAAGTCTGGCACCTCAGCCTCCCTGGCCATCACTGGGCTC
CAGGCTGAAGATGAGGCTGATTATTACTGCCAGTCCTATGACAGCAGCCTGAGGGCTGC
GGTATTCGGCGGAGGGACCAAGGTCACCGTCCTA (SEQ ID NO: 358)
Her2_S1R3A1_DP47_2H6
V_{H} with CDR1, CDR2 and CDR3 underlined
EVQLLESGGGLVQPGGSLRLSCAASGFTFSSYAMSWVRQAPGKGLEWVSAISGSGGSTYYA
DSVKGRFTISRDNSKNTLYLQMNSLRAEDTAVYYCAKDFWFGLPPSFFDSWGQGTMVTVSS (SEQ ID NO: 359)
GAGGTGCAGCTGTTGGAGTCTGGGGGAGGCTTGGTACAGCCTGGGGGGTCCCTGAGACT
CTCCTGTGCAGCCTCTGGATTCACCTTTAGCAGCTATGCCATGAGCTGGGTCCGCCAGGC
TCCAGGGAAGGGGCTGGAGTGGGTCTCAGCTATTAGTGGTAGTGGTGGTAGCACATACT
ACGCAGACTCCGTGAAGGGCCGGTTCACCATCTCCAGAGACAATTCCAAGAACACGCTG
TATCTGCAAATGAACAGCCTGAGAGCCGAGGACACGGCCGTGTATTACTGTGCGAAAGA
TTTCTGGTTTGGACTACCACCTTCCTTCTTTGACTCTTGGGGCCAAGGGACAATGGTCACC
GTCTCGAGT (SEQ ID NO: 360)
V_{L} with CDR1, CDR2 and CDR3 underlined
QSVLTQPPSVSVSPGQKASITCSGERMGDKYAAWYQQKPGQSPILVIYQDTKRPSGIPERFSG
SNSGNTATLTISGTQDMDEADYYCQVWDSSTGVFGGGTKVTVL (SEQ ID NO: 361)
CAGTCTGTGCTGACTCAGCCACCCTCAGTGTCCGTGTCCCCAGGACAGAAGGCCAGCATC
ACCTGCTCTGGAGAAAGAATGGGGGATAAATATGCTGCCTGGTATCAGCAGAAGCCAGG
CCAGTCACCTATACTGGTCATCTATCAAGATACAAAGCGGCCCTCAGGGATCCCTGAGCG
ATTCTCTGGCTCCAACTCTGGGAACACAGCCACGTTGACCATCAGCGGGACCCAGGACAT
GGATGAGGCTGACTATTACTGTCAGGTGTGGGACAGCAGCACTGGGGTATTCGGCGGAG
GGACCAAGGTCACCGTCCTA (SEQ ID NO: 362)
Her2_S1R3A1_DP47_4G1
V_{H} with CDR1, CDR2 and CDR3 underlined
EVQLLESGGGLVQPGGSLRLSCAASGFTFSSYAMSWVRQAPGKGLEWVSAISGSGGSTYYA
DSVKGRFTISRDNSKNTLYLQMNSLRAEDTAVYYCAKDLNPYSVVTLGMDVWGRGTMVTV
SS (SEQ ID NO: 363)
GAGGTGCAGCTGTTGGAGTCTGGGGGAGGCTTGGTACAGCCTGGGGGGTCCCTGAGACT
CTCCTGTGCAGCCTCTGGATTCACCTTTAGCAGCTATGCCATGAGCTGGGTCCGCCAGGC
TCCAGGGAAGGGGCTGGAGTGGGTCTCAGCTATTAGTGGTAGTGGTGGTAGCACATACT
ACGCAGACTCCGTGAAGGGCCGGTTCACCATCTCCAGAGACAATTCCAAGAACACGCTG
TATCTGCAAATGAACAGCCTGAGAGCCGAGGACACGGCCGTGTATTACTGTGCGAAAGA
TCTGAACCCTTATTCAGTGGTAACTCTCGGTATGGACGTCTGGGGCAGAGGGACAATGGT
CACCGTCTCGAGT (SEQ ID NO: 364)
V_{L} with CDR1, CDR2 and CDR3 underlined
QSVLTQPPSVSVAPGQAARIPCGGDNIGSKSVHWYQQRPGQAPVLVVFDDSDRPSGIPERFSG
SNSGHTATLTINRVEPGDEAEYYCEVWDGGERHVVFGGGTKLTVL (SEQ ID NO: 365)
CAGTCTGTGCTGACTCAGCCACCCTCGGTGTCAGTGGCCCCAGGACAGGCGGCCAGGATT
CCCTGTGGGGGAGACAACATTGGAAGTAAGAGTGTTCACTGGTACCAGCAGAGGCCAGG
CCAGGCCCCTGTCCTGGTCGTCTTTGATGATAGTGACCGGCCCTCAGGGATCCCTGAGCG
ATTCTCTGGCTCCAATTCTGGGCACACGGCCACCCTGACCATCAACAGGGTCGAACCCGG
GGATGAGGCCGAGTATTATTGTGAGGTGTGGGATGGTGGCGAGAGACATGTGGTATTCG
GCGGAGGGACCAAGCTGACCGTCCTA (SEQ ID NO: 366)
Her2_S1R2A_DP47_3C1
V_{H} with CDR1, CDR2 and CDR3 underlined
EVQLLESGGGLVQPGGSLRLSCAASGFTFSSYAMSWVRQAPGKGLEWVSAISGSGGSTYYA
DSVKGRFTISRDNSKNTLYLQMNSLRAEDTAVYYCARDLTGPNHWFFDLWGRGTTVTVSS (SEQ ID NO: 367)
GAGGTGCAGCTGTTGGAGTCTGGGGGAGGCTTGGTACAGCCTGGGGGGTCCCTGAGACT
CTCCTGTGCAGCCTCTGGATTCACCTTTAGCAGCTATGCCATGAGCTGGGTCCGCCAGGC
TCCAGGGAAGGGGCTGGAGTGGGTCTCAGCTATTAGTGGTAGTGGTGGTAGCACATACT
ACGCAGACTCCGTGAAGGGCCGGTTCACCATCTCCAGAGACAATTCCAAGAACACGCTG
TATCTGCAAATGAACAGCCTGAGAGCCGAGGACACGGCCGTGTATTACTGTGCCAGAGA
TTTAACTGGCCCAAACCACTGGTTCTTCGATCTCTGGGGGCGGGGGACCACGGTCACCGT
CTCGAGT (SEQ ID NO: 368)
V_{L} with CDR1, CDR2 and CDR3 underlined
QSVLTQPPSVSVSPGQTASISCSGHRLGDKYVSWYRQRPGQSPVLVIYQDEKRYSGISERFSGS
NSGNVATLTITGTQAMDEADYHC QAWDSTTVVFGGGTKLTVL (SEQ ID NO: 369)
CAGTCTGTGCTGACTCAGCCACCCTCCGTGTCCGTGTCCCCAGGACAGACAGCCAGCATC
TCCTGCTCTGGACATAGATTGGGCGATAAGTATGTTAGTTGGTATCGGCAGAGGCCGGGC
CAGTCCCCTGTGCTGGTCATCTATCAAGATGAGAAGAGGTACTCAGGGATCTCTGAGCGA
TTCTCTGGCTCCAACTCTGGGAACGTAGCCACTCTGACCATCACCGGGACCCAGGCTATG
GATGAGGCTGACTATCACTGTCAGGCGTGGGACAGCACCACTGTGGTGTTCGGCGGAGG
GACCAAGCTGACCGTCCTA (SEQ ID NO: 370)
Her2_S1R3A1_DP47_7B2
V_{H} with CDR1, CDR2 and CDR3 underlined
EVQLLESGGGLVQPGGSLRLSCAASGFTFSSYAMSWVRQAPGKGLEWVSAISGSGGSTYYA
DSVKGRFTISRDNSKNTLYLQMNSLRAEDTAVYYCARDRRPRDDAFDMWGRGTTVTVSS (SEQ ID NO: 371)
GAGGTGCAGCTGTTGGAGTCTGGGGGAGGCTTGGTACAGCCTGGGGGGTCCCTGAGACT
CTCCTGTGCAGCCTCTGGATTCACCTTTAGCAGCTATGCCATGAGCTGGGTCCGCCAGGC
TCCAGGGAAGGGGCTGGAGTGGGTCTCAGCTATTAGTGGTAGTGGTGGTAGCACATACT
ACGCAGACTCCGTGAAGGGCCGGTTCACCATCTCCAGAGACAATTCCAAGAACACGCTG
TATCTGCAAATGAACAGCCTGAGAGCCGAGGACACGGCCGTGTATTACTGTGCGAGAGA
TAGACGGCCGAGGGATGATGCTTTTGATATGTGGGGGAGAGGGACCACGGTCACCGTCT
CGAGT (SEQ ID NO: 372)
V_{L} with CDR1, CDR2 and CDR3 underlined
DIQMTQSPSSVSASVGDRVSITCRASQGIGSWLFWYQQKPGKAPILLMSAVSGLQSGVPSRFS
GSGSGTDFTLTISSVQPEDFATYYCQQAHSFPITFGQGTRLEIKR (SEQ ID NO: 373)
GACATCCAGATGACCCAGTCTCCCTCTTCTGTGTCTGCTTCTGTTGGAGACAGAGTCAGC
ATCACTTGTCGGGCGAGTCAGGGAATTGGCAGCTGGTTATTCTGGTATCAGCAGAAACCA
GGGAAAGCCCCTATCCTCCTGATGTCCGCTGTGTCCGGTTTGCAAAGTGGAGTCCCATCA
CGATTCAGCGGCAGCGGATCTGGGACAGATTTCACTCTCACGATCAGCAGCGTACAGCCT
GAGGATTTTGCAACTTACTATTGTCAACAGGCTCACAGTTTCCCTATCACCTTCGGCCAA
GGGACACGACTGGAGATTAAACGT (SEQ ID NO: 374)
Her2_S1R3B2_DP47_4E2
V_{H} with CDR1, CDR2 and CDR3 underlined
EVQLLESGGGLVQPGGSLRLSCAASGFTFSSYAMSWVRQAPGKGLEWVSAISGSGGSTYYA
DSVKGRFTISRDNSKNTLYLQMNSLRAEDTAVYYCARDRVSNWNYYGQDSYFDYWGQGT
MVTVSS (SEQ ID NO: 375)
GAGGTGCAGCTGTTGGAGTCTGGGGGAGGCTTGGTACAGCCTGGGGGGTCCCTGAGACT
CTCCTGTGCAGCCTCTGGATTCACCTTTAGCAGCTATGCCATGAGCTGGGTCCGCCAGGC
TCCAGGGAAGGGGCTGGAGTGGGTCTCAGCTATTAGTGGTAGTGGTGGTAGCACATACT
ACGCAGACTCCGTGAAGGGCCGGTTCACCATCTCCAGAGACAATTCCAAGAACACGCTG
TATCTGCAAATGAACAGCCTGAGAGCCGAGGACACGGCCGTGTATTACTGTGCGAGGGA
CAGGGTCTCTAACTGGAACTACTACGGCCAGGACAGCTACTTTGACTACTGGGGCCAGG
GGACAATGGTCACCGTCTCGAGT (SEQ ID NO: 376)
V_{L} with CDR1, CDR2 and CDR3 underlined
QSVLTQPPSASGAPGQRVTISCSGTNSNIGSNNVNWYQQLPGKAPRLLIYNNNQRPSGVPDRF
SGSKSGTSASLAISGLQSELEADYYCSAWDDSLHGPVFGGGTKLTVL (SEQ ID NO: 377)
CAGTCTGTGCTGACTCAGCCACCCTCCGCGTCTGGGGCCCCCGGGCAGAGGGTCACCATT
TCTTGTTCTGGGACCAACTCCAACATCGGAAGTAATAATGTAAACTGGTATCAGCAACTC
CCAGGAAAGGCCCCCAGACTCCTCATCTACAATAATAATCAGAGGCCCTCAGGGGTCCC
TGACCGATTCTCTGGCTCCAAGTCTGGCACCTCAGCCTCCCTGGCCATCAGTGGGCTCCA
GTCTGAGCTTGAGGCTGATTATTATTGTTCAGCATGGGATGACAGCCTGCATGGTCCGGT
GTTCGGCGGAGGGACCAAGCTGACCGTCCTA (SEQ ID NO: 378)
Her2_S1R3A1_CS_16C2
V_{H} with CDR1, CDR2 and CDR3 underlined
EVQLVESGGGLAQPGGSLRLSCAASGLTFTTYAMSWVRQAPGKGLEWVSSISGSGHSTYYA
DSVKGRFTISRDISKNTLYLQMNSLRAEDTAVYYCAKDSSAFGFVHGAFDIWGQGTLVTVSS (SEQ ID NO: 379)
GAGGTGCAGCTGGTGGAGTCTGGGGGAGGCTTGGCACAGCCTGGGGGGTCCCTGAGACT
CTCCTGTGCAGCCTCTGGATTAACCTTTACCACCTATGCCATGAGCTGGGTCCGCCAGGC
TCCAGGGAAGGGGCTGGAGTGGGTCTCAAGTATTAGTGGAAGTGGTCATAGCACATATT
ACGCAGACTCCGTGAAGGGCCGCTTCACCATCTCCAGAGACATTTCCAAGAACACGTTGT
ATCTGCAAATGAACAGCCTCAGAGCCGAGGACACGGCCGTCTATTACTGTGCGAAAGAT
TCGTCGGCTTTTGGGTTTGTACACGGTGCTTTTGATATCTGGGGCCAGGGAACCCTGGTC
ACCGTCTCGAGT (SEQ ID NO: 380)
V_{L} with CDR1, CDR2 and CDR3 underlined
SSELTQDPAASVALGQTVSITCQGDSLRNYWASWYQQKPGQAPVLVIYGKNTRPSGIPDRFS
GSTSGNTASLTITGAQAEDEADYYCNSRDSGHRLLFGGGTKLTVL (SEQ ID NO: 381)
TCTTCTGAGCTGACTCAGGACCCTGCTGCGTCTGTGGCCTTGGGACAGACAGTCAGCATC
ACATGCCAAGGAGACAGCCTCAGAAACTATTGGGCTAGCTGGTACCAGCAGAAGCCAGG
ACAGGCCCCTGTACTTGTCATCTATGGTAAAAATACCCGGCCCTCAGGGATCCCAGACCG
ATTCTCTGGCTCCACCTCAGGAAACACAGCTTCCTTGACCATCACTGGGGCTCAGGCGGA
GGATGAGGCTGACTATTACTGCAACTCCCGGGACAGTGGTCACCGTCTTCTTTTCGGCGG
AGGGACCAAGCTGACCGTCCTA (SEQ ID NO: 382)
Her2_S1R3A1_CS_11E5
V_{H} with CDR1, CDR2 and CDR3 underlined
EVQLVQSGAEVKRPGESLKISCRASGYIFTNNWVAWVRQQPGKGLEWMGIIYPGDSDTRYSP
SFQGQVTFSADTSINTAYLQWNSLKASDTATYFCAREAYNSYEYYGMDVWGRGTTVTVSS (SEQ ID NO: 383)
GAGGTGCAGCTGGTGCAGTCTGGGGCAGAAGTCAAGAGGCCCGGAGAGTCTCTGAAGAT
CTCCTGTAGGGCCTCTGGATACATCTTTACGAACAATTGGGTCGCCTGGGTGCGCCAGCA
GCCCGGGAAAGGCCTGGAGTGGATGGGGATCATCTATCCTGGTGACTCTGACACCAGAT
ACAGCCCGTCCTTCCAAGGCCAGGTCACTTTCTCGGCCGACACGTCCATCAACACCGCCT
ACCTACAGTGGAATAGCCTGAAGGCCTCGGACACCGCCACTTACTTCTGTGCGCGAGAG
GCCTACAACTCATACGAATATTACGGTATGGACGTCTGGGGGCGAGGGACCACGGTCAC
CGTCTCGAGT (SEQ ID NO: 384)
V_{L} with CDR1, CDR2 and CDR3 underlined
QTVVIQEPSFSVSPGGTVTLTCGLSSGSVSTNYYPSWYQQTPGQAPRTLIYNTNTRSSGVPDRF
SGSILGNKAALTITGAQADDESDYYCVLYMGSGISVFGGGTKVTVL (SEQ ID NO: 385)
CAGACTGTGGTGATCCAGGAGCCATCGTTCTCAGTGTCCCCTGGAGGGACAGTCACACTC
ACTTGTGGCTTGAGCTCTGGCTCAGTCTCTACTAATTACTACCCCAGCTGGTACCAGCAG
ACCCCAGGCCAGGCTCCACGCACGCTCATCTACAACACAAACACTCGCTCTTCTGGGGTC
CCTGATCGCTTCTCTGGCTCCATCCTTGGGAACAAAGCTGCCCTCACCATCACGGGGGCC
CAGGCAGATGATGAATCTGATTATTACTGTGTGCTGTATATGGGTAGTGGCATTTCGGTG
TTCGGCGGAGGGACCAAGGTCACCGTCCTA (SEQ ID NO: 386)
Her2_S1R3A1_CS_16D7
V_{H} with CDR1, CDR2 and CDR3 underlined
EVQLVESGAEVKKPGESLKISCKASGYIFTNNWIAWVRQQPGKGLEWMGIIYPGDSDTRYSP
SFQGRVTFSADTSINTAYLQWSSLKASDTATYYCAREAYNSYEYYGMDVWGQGTMVTVSS (SEQ ID NO: 387)
GAGGTGCAGCTGGTGGAGTCCGGAGCAGAAGTCAAAAAGCCCGGAGAGTCTCTGAAGAT
CTCCTGTAAGGCTTCTGGATACATCTTTACGAACAATTGGATCGCCTGGGTGCGGCAGCA
GCCCGGGAAAGGCCTGGAGTGGATGGGAATCATCTATCCTGGTGACTCTGACACCAGAT
ACAGCCCGTCCTTCCAGGGCCGGGTCACTTTCTCAGCCGACACGTCCATCAACACCGCCT
ACCTCCAGTGGAGTAGCCTGAAGGCCTCGGACACCGCCACTTACTACTGTGCGAGAGAG
GCCTACAACTCATACGAGTACTACGGTATGGACGTCTGGGGCCAAGGGACAATGGTCAC
CGTCTCGAGT (SEQ ID NO: 388)
V_{L} with CDR1, CDR2 and CDR3 underlined
QTVVLQEPAFSVSPGGTVTLTCGLSSGSVSTSYYPSWYQQTPGQPPRTLIYNTNTRSSGVSDR
FSGSILGNKAALTITGAQAEDESDYYCVLYMGSGISVFGGGTKLTVL (SEQ ID NO: 389)
CAGACTGTGGTGCTCCAGGAGCCAGCGTTCTCAGTGTCCCCTGGAGGGACAGTCACACTC
ACCTGTGGCTTGAGCTCTGGCTCAGTCTCTACTAGTTACTACCCCAGTTGGTACCAGCAG
ACCCCAGGCCAGCCTCCACGCACGCTCATCTACAACACAAACACCCGCTCTTCTGGGGTC
TCTGATCGCTTCTCTGGCTCCATCCTTGGGAACAAAGCTGCCCTCACCATCACGGGGGCC
CAGGCCGAAGATGAATCTGATTATTACTGTGTTCTGTATATGGGTAGTGGCATTTCGGTA
TTCGGCGGGGGGACCAAGCTGACCGTCCTA (SEQ ID NO: 390)
Her2_S1R2A_CS_10B10
V_{H} with CDR1, CDR2 and CDR3 underlined
EVQLVQSGAEVKKPGASVRVSCKGSGNTFTGHYIHWVRQAPGQGLEWLGWIDPNTGDIQYS
ENFKGSVTLTRDPSINSVFMDLIRLTSDDTAMYYCAREGAGLANYYYYGLDVWGRGTMVT
VSS (SEQ ID NO: 391)
GAAGTGCAGCTGGTGCAGTCTGGGGCTGAGGTGAAGAAGCCTGGGGCCTCAGTGAGGGT
CTCCTGCAAGGGTTCTGGAAACACCTTCACCGGCCACTACATCCACTGGGTGCGACAGGC
CCCTGGACAAGGACTTGAGTGGCTGGGATGGATCGACCCTAACACTGGTGACATACAGT
ATTCAGAAAACTTTAAGGGCTCGGTCACCTTGACCAGGGACCCATCCATCAACTCAGTCT
TCATGGACCTGATCAGGCTGACATCTGACGACACGGCCATGTATTACTGTGCGAGAGAA
GGTGCCGGGCTCGCCAACTACTATTACTACGGTCTGGACGTCTGGGGCCGAGGGACAAT
GGTCACCGTCTCGAGT (SEQ ID NO: 392)
V_{L} with CDR1, CDR2 and CDR3 underlined
QTVVLQEPSFSVSPGGTVTLTCGLNFGSVSTAYYPSWYQQTPGQAPRTLIYGTNIRSSGVPDR
FSGSIVGNKAALTITGAQTEDESDYYCALYMGSGMLFGGGTKVTVL (SEQ ID NO: 393)
CAGACTGTGGTGCTCCAGGAGCCTTCGTTCTCAGTGTCCCCTGGGGGGACAGTCACACTC
ACTTGTGGCTTGAACTTTGGCTCAGTCTCTACTGCTTACTACCCCAGTTGGTACCAGCAGA
CCCCAGGCCAAGCTCCACGCACGCTCATCTACGGCACAAATATTCGTTCCTCTGGGGTCC
CGGATCGCTTCTCTGGCTCCATCGTAGGGAACAAAGCTGCCCTCACCATCACGGGGGCCC
AGACAGAAGATGAGTCTGATTATTATTGTGCGCTGTATATGGGTAGTGGCATGCTCTTCG
GCGGCGGGACCAAGGTCACCGTCCTA (SEQ ID NO: 394)
Her2_S1R3A1_CS_15C2
V_{H} with CDR1, CDR2 and CDR3 underlined
QVQLQESGPGLVKPAGTLSLTCAVSGDSISSNHWWNWVRQSPGKGLEWIGEIFHSDIRILNPS
LKRRVSMSVDRSKDQFSLQLTSVTAADTAVYYCARGFHGDSGRGLDTWGRGTLVTVSS (SEQ ID NO: 395)
CAGGTGCAGCTGCAGGAGTCCGGCCCAGGACTCGTGAAGCCTGCGGGGACTCTGTCCCT
CACCTGCGCTGTCTCCGGTGACTCCATCAGCAGCAATCACTGGTGGAATTGGGTCCGCCA
GTCCCCAGGGAAGGGACTGGAATGGATTGGTGAAATCTTTCATAGTGACATTCGCATCCT
CAACCCGTCCCTCAAGAGGCGCGTCTCCATGTCAGTCGACAGGTCCAAGGACCAATTCTC
CCTGCAACTGACCTCTGTGACCGCCGCGGACACGGCCGTGTATTACTGTGCGAGAGGTTT
CCATGGTGACTCCGGCAGAGGACTTGACACCTGGGGCAGAGGAACCCTGGTCACCGTCT
CGAGT (SEQ ID NO: 396)
V_{L} with CDR1, CDR2 and CDR3 underlined
SSELTQDPAVSVALGQTVRVTCQGDGLRSYYASWYQQKPGQAPVLVMYGNNNRPSGIPDRF
SGSSSGNTASLTITGAQAEDEAVYYCNSRDSGANHLEVFGGGTKVTVL (SEQ ID NO: 397)
TCTTCTGAGCTGACTCAGGACCCTGCTGTGTCTGTGGCCTTGGGACAGACAGTCAGGGTC
ACATGCCAAGGAGACGGCCTCAGAAGTTATTATGCAAGCTGGTACCAGCAGAAGCCAGG
GCAGGCCCCTGTCCTTGTCATGTATGGGAACAACAACCGGCCCTCAGGGATCCCAGACC
GATTCTCTGGCTCCAGCTCGGGAAACACAGCTTCCTTGACCATCACTGGGGCTCAGGCGG
AAGATGAGGCTGTCTATTATTGTAATTCGCGGGACAGCGGTGCTAACCATCTGGAGGTTT
TCGGCGGAGGGACCAAGGTCACCGTCCTA (SEQ ID NO: 398)
Her2_S1R3A1_CS_9C1
V_{H} with CDR1, CDR2 and CDR3 underlined
QVQLQESGPGLVKPSETLSLTCTVSGYSISSGYYWGWIRQPPGRGLEWIGTIYHSGSTYYNPS
LKSRLTISVDTSENQFSLKLSSVTAADTAVYYCARGIAGRTHYDYWGQGTMVTVSS (SEQ ID NO: 399)
CAGGTGCAGCTGCAGGAGTCGGGCCCAGGACTGGTGAAGCCTTCGGAGACCCTGTCCCT
CACCTGCACTGTCTCTGGTTACTCCATTAGCAGTGGTTACTACTGGGGCTGGATCCGGCA
GCCCCCAGGGAGGGGGCTGGAGTGGATTGGGACTATCTATCATAGTGGGAGCACCTACT
ACAACCCGTCCCTCAAGAGTCGACTCACCATATCAGTAGACACGTCCGAGAACCAATTCT
CCCTGAAGCTGAGTTCTGTGACCGCCGCAGACACGGCCGTGTATTACTGTGCGAGAGGG
ATAGCAGGTCGGACCCATTATGACTACTGGGGCCAGGGGACAATGGTCACCGTCTCGAGT (SEQ ID NO: 400)
V_{L} with CDR1, CDR2 and CDR3 underlined
QAVLTQPSSVSGAPGQRVTISCSGSSSNIGAGYDVHWYQQLPGAAPKLLIYSNNHRPSGVPDR
FSGSKSGTSASLAITGLQTEDEADYYCQSYDRSLSGRVFGGGTKLTVL (SEQ ID NO: 401)
CAGGCTGTGCTGACTCAGCCGTCCTCAGTGTCTGGGGCCCCAGGGCAGAGGGTAACCAT
CTCCTGCAGTGGGAGCAGCTCCAACATCGGGGCAGGTTATGATGTACACTGGTACCAGC
AGCTCCCAGGAGCAGCCCCCAAACTCCTCATCTATAGTAACAATCATCGGCCCTCAGGGG
TCCCTGACCGATTCTCTGGCTCCAAGTCTGGCACCTCAGCCTCCCTGGCCATCACTGGGCT
CCAGACTGAGGATGAGGCTGATTATTACTGCCAGTCCTATGACAGAAGCCTGAGCGGTA
GGGTGTTCGGCGGAGGGACCAAGCTGACCGTCCTA (SEQ ID NO: 402)
Her2_S1R2A_CS_5A1
V_{H} with CDR1, CDR2 and CDR3 underlined
EVQLLESGGGLVQPGGSLRLSCAASGFTFSSYAMSWVRQAPGKGLEWVSAISGSGGSTYYA
DSVKGRFTISRDNSKNTLYLQMNSLRAEDTAVYYCAQGTHSSGWSFGYWGQGTLVTVSS (SEQ ID NO: 403)
GAGGTGCAGCTGTTGGAGTCTGGGGGAGGCTTGGTACAGCCTGGGGGGTCCCTGAGACT
CTCCTGTGCAGCCTCTGGATTCACCTTTAGCAGCTATGCCATGAGCTGGGTCCGCCAGGC
TCCAGGGAAGGGGCTGGAGTGGGTCTCAGCTATTAGTGGTAGTGGTGGTAGCACATACT
ACGCAGACTCCGTGAAGGGCCGGTTCACCATCTCCAGAGACAATTCCAAGAACACGCTG
TATCTGCAAATGAACAGCCTGAGAGCCGAGGACACGGCCGTGTATTACTGTGCGCAGGG
TACTCATAGCAGTGGCTGGTCCTTTGGGTACTGGGGCCAGGGCACCCTGGTCACCGTCTC
GAGT (SEQ ID NO: 404)
V_{L} with CDR1, CDR2 and CDR3 underlined
LPVLTQPPSASGTPGQRVTISCSGSSSNIGSKTVNWYQQLPGTTPKLLIYRNNQRPSGVPDRFS
GSKSGTSASLAISGLQSEDEADYYCAAWDDSLNGLIFGGGTKVTVL (SEQ ID NO: 405)
CTGCCTGTGCTGACTCAGCCCCCCTCAGCGTCTGGGACCCCCGGGCAGAGGGTCACCATC
TCTTGTTCTGGAAGCAGCTCCAACATCGGAAGTAAAACTGTAAACTGGTACCAGCAGCTC
CCAGGAACGACCCCCAAACTCCTCATCTATAGGAATAATCAGCGGCCCTCAGGGGTCCCT
GACCGATTCTCTGGCTCCAAGTCTGGCACCTCAGCCTCCCTGGCCATCAGTGGGCTCCAG
TCTGAGGATGAGGCTGATTATTATTGTGCAGCATGGGATGACAGCCTGAATGGTCTGATA
TTCGGCGGAGGGACCAAGGTCACCGTCCTA (SEQ ID NO: 406)
Her2_S1R2A_CS_8C8
V_{H} with CDR1, CDR2 and CDR3 underlined
QVQLVQSGAEVKKPGESLKISCKTSGYSFTSYWIGWVRQMPGKGLEWMGIIYPGDSDTRYSP
SFQGQVTISADKSISTAYLQWSSLKASDTAMYYCARHDLPHQEYQDNGMDVWGKGTLVTV
SS (SEQ ID NO: 407)
CAGGTCCAGCTGGTACAGTCTGGAGCAGAGGTTAAAAAGCCCGGGGAGTCTCTGAAGAT
CTCCTGTAAGACTTCTGGATACAGCTTTACCAGCTATTGGATCGGCTGGGTGCGCCAGAT
GCCCGGGAAAGGCCTGGAGTGGATGGGGATCATCTATCCTGGTGACTCTGATACCAGAT
ACAGCCCGTCTTTTCAAGGCCAGGTCACCATCTCAGCCGACAAGTCCATCAGCACCGCCT
ACCTGCAGTGGAGCAGCCTGAAGGCCTCGGACACCGCCATGTATTACTGTGCGAGACAT
GACCTCCCCCATCAGGAGTATCAGGACAACGGTATGGACGTCTGGGGCAAAGGAACCCT
GGTCACCGTCTCGAGT (SEQ ID NO: 408)
V_{L} with CDR1, CDR2 and CDR3 underlined
QTVVIQEPSFSVSPGETVTLTCALSSGSVSSSYYPSWYQQTPGQAPRALIYNTNTRSSGVPDRF
SGSILGNKAALTITGAQADDESNYYCALYLGSGIWVFGGGTKLTVL (SEQ ID NO: 409)
CAGACTGTGGTGATCCAGGAGCCATCGTTCTCAGTGTCCCCTGGAGAGACAGTCACACTC
ACTTGTGCCTTGAGCTCTGGCTCAGTCTCTAGTAGTTACTACCCCAGCTGGTACCAGCAG
ACCCCAGGCCAGGCTCCACGCGCGCTCATCTACAACACAAACACTCGCTCTTCTGGGGTC
CCTGATCGCTTCTCTGGCTCCATCCTTGGGAACAAAGCTGCCCTCACCATCACGGGGGCC
CAGGCAGATGATGAATCTAACTATTACTGTGCGCTGTATCTGGGTAGTGGCATTTGGGTG
TTCGGCGGAGGGACCAAGCTGACCGTCCTA (SEQ ID NO: 410)
Her2_S1R3A1_CS_13H5
V_{H} with CDR1, CDR2 and CDR3 underlined
EVQLVQSGAEVKKPGESLKISCKGSGYSFPSYWIGWVRQMPGKGLEWMGIIYPGDSETRYSP
SFQGQVTISADKSISTAYLQWSSLKASDTAMYYCVRHLKPVAGPAWHDYGMDVWGQGTLV
TVSS (SEQ ID NO: 411)
GAGGTCCAGCTGGTGCAGTCTGGAGCAGAGGTGAAAAAGCCCGGGGAGTCTCTGAAGAT
CTCCTGTAAGGGTTCTGGATACAGCTTTCCCAGCTACTGGATCGGCTGGGTGCGCCAGAT
GCCCGGGAAAGGCCTGGAGTGGATGGGGATCATCTATCCTGGTGACTCTGAAACCAGAT
ACAGCCCGTCCTTCCAAGGCCAGGTCACCATCTCAGCCGACAAGTCCATCAGCACCGCCT
ACCTGCAGTGGAGCAGCCTGAAGGCCTCGGACACCGCCATGTATTACTGTGTGAGACAT
CTAAAACCAGTGGCTGGTCCCGCTTGGCACGACTACGGTATGGACGTCTGGGGCCAGGG
CACCCTGGTCACCGTCTCGAGT (SEQ ID NO: 412)
V_{L} with CDR1, CDR2 and CDR3 underlined
QAVVLQEPSISVSPGGTVTLTCGLTSDSVSTTYYPSWYQQTPGQTPRTLSYSTNTRSSGVPDR
FSGSILGNKAALTIAGAQADDEADYYCALYMGSGIWVFGGGTQLTVL (SEQ ID NO: 413)
CAGGCTGTGGTGCTCCAGGAGCCATCGATCTCAGTGTCCCCTGGAGGGACAGTCACACTC
ACTTGTGGCTTAACCTCTGACTCAGTCTCGACTACTTACTACCCCAGCTGGTACCAGCAG
ACCCCAGGCCAGACTCCACGCACACTCAGCTACAGCACAAATACTCGCTCTTCTGGGGTC
CCTGATCGCTTCTCTGGCTCCATCCTTGGGAACAAAGCTGCCCTCACCATCGCGGGGGCC
CAGGCAGATGATGAAGCTGATTATTACTGTGCCCTATATATGGGCAGTGGCATTTGGGTG
TTCGGCGGAGGGACCCAGCTCACCGTTTTA (SEQ ID NO: 414)
Her2_S1R2B_CS_5E9
V_{H} with CDR1, CDR2 and CDR3 underlined
QVQLVQSGAEVKKPGESLKISCKGSGYSFANYGIGWVRQMPGKGLEWMGVIYPGDSDIRYS
PSFQGQVIFSADRSISTAYLQWSSLKASDTAMYYCARHLSWLVGGNYGMDVWGKGTMVTV
SS (SEQ ID NO: 415)
CAGGTGCAGCTGGTGCAGTCTGGAGCAGAGGTGAAAAAGCCCGGGGAGTCTCTGAAGAT
CTCCTGTAAGGGTTCTGGATACAGTTTTGCCAACTACGGGATAGGCTGGGTGCGCCAGAT
GCCCGGGAAAGGCCTGGAGTGGATGGGGGTCATCTATCCTGGTGACTCTGATATCAGAT
ACAGCCCGTCCTTCCAAGGCCAGGTCATCTTCTCAGCCGACAGGTCCATCAGCACCGCCT
ACCTGCAGTGGAGCAGCCTGAAGGCCTCGGACACCGCCATGTATTATTGTGCGAGACAT
CTCTCGTGGCTGGTCGGGGGGAACTACGGTATGGACGTCTGGGGCAAAGGGACAATGGT
CACCGTCTCGAGT (SEQ ID NO: 416)
V_{L} with CDR1, CDR2 and CDR3 underlined
QTVVIQEPSFSVSPGGTVTLTCGLTSGSVSTSHYPSWYQQTPGQAPRTLIYSTNTRSSGVPGRF
SGSILGNKAALTITGAQADDESDYYCVLYMGGGISVFGGGTKVTVL (SEQ ID NO: 417)
CAGACTGTGGTGATCCAGGAGCCATCGTTCTCAGTGTCCCCTGGAGGGACAGTCACACTC
ACTTGTGGCTTGACCTCTGGCTCAGTCTCTACTAGTCACTACCCCAGCTGGTACCAGCAG
ACCCCAGGCCAGGCTCCACGCACGCTCATCTACAGCACAAACACTCGCTCTTCTGGGGTC
CCTGGTCGCTTCTCTGGCTCCATCCTTGGGAACAAAGCTGCCCTCACCATCACGGGGGCC
CAGGCAGACGATGAATCTGATTATTATTGTGTGCTGTATATGGGTGGTGGCATTTCGGTG
TTCGGCGGAGGGACCAAGGTCACCGTCCTA (SEQ ID NO: 418)
Her2_S1R3A1_CS_8F9
V_{H} with CDR1, CDR2 and CDR3 underlined
QVQLVQSGAEVKKPGESLKISCKGSGYSFTSQWIAWVRQMPGKGLEWMGIIYPGDSDTRYSP
SFQGQVTISADKSINTAYLQWSSLKASDTAMYYCARHSGSSGDYYHYYGMDVWGQGTMVT
VSS (SEQ ID NO: 419)
CAGGTGCAGCTGGTGCAATCTGGGGCAGAGGTGAAAAAGCCCGGGGAGTCTCTGAAGAT
CTCCTGTAAGGGTTCTGGATACAGCTTTACCAGCCAGTGGATCGCCTGGGTGCGCCAGAT
GCCCGGGAAAGGCCTGGAGTGGATGGGGATCATCTATCCTGGTGACTCTGATACGAGAT
ACAGCCCGTCCTTCCAAGGCCAGGTCACCATCTCAGCCGACAAGTCCATCAACACCGCCT
ACCTGCAGTGGAGCAGCCTGAAGGCCTCGGACACCGCCATGTATTACTGTGCGAGACAT
TCGGGGAGCTCTGGAGATTACTACCACTACTACGGTATGGACGTCTGGGGCCAAGGGAC
AATGGTCACCGTCTCGAGT (SEQ ID NO: 420)
V_{L} with CDR1, CDR2 and CDR3 underlined
QTVVIQEPSFSVSPGGTVTLTCGLSSGSVSTSYYPSWYQQTPGQAPRTLIYSTNTRSSGVPDRF
SGSILGNKAALTITGAQADDESDYYCVLYMGSGISVFGGGTKLTVL (SEQ ID NO: 421)
CAGACTGTGGTGATCCAGGAGCCATCGTTCTCAGTGTCCCCTGGAGGGACAGTCACACTC
ACTTGTGGCTTGAGCTCTGGCTCAGTCTCTACTAGTTACTACCCCAGCTGGTACCAGCAG
ACCCCAGGCCAGGCTCCACGCACGCTCATCTACAGCACAAACACTCGCTCTTCTGGGGTC
CCTGATCGCTTCTCTGGCTCCATCCTTGGGAACAAAGCTGCCCTCACCATCACGGGGGCC
CAGGCAGATGATGAATCTGATTATTACTGTGTGCTGTATATGGGGAGTGGCATTTCGGTG
TTCGGCGGAGGGACCAAGCTGACCGTCCTA (SEQ ID NO: 422)
Her2_S1R3A1_CS_14B5
V_{H} with CDR1, CDR2 and CDR3 underlined
EVQLVQSGAEMKKPGESLKISCKTSGYSFTGSWIAWVRQMPGKGLEWMGIIYPGDSDTRYSP
SFQGQVTISADKSISTAYLQWSSLKASDTAMYYCARIYSDSGYNWFDSWGRGTLVTVSS (SEQ ID NO: 423)
GAGGTGCAGCTGGTGCAGTCTGGGGCAGAGATGAAAAAGCCCGGGGAGTCTCTGAAGAT
ATCCTGCAAGACTTCTGGATACAGCTTTACCGGCTCCTGGATCGCCTGGGTGCGCCAGAT
GCCCGGGAAAGGCCTGGAGTGGATGGGGATCATCTATCCTGGTGACTCTGACACCAGAT
ACAGCCCGTCCTTCCAAGGCCAGGTCACCATCTCAGCCGACAAGTCCATCAGCACCGCCT
ACCTGCAGTGGAGCAGCCTGAAGGCCTCGGACACCGCCATGTATTACTGTGCGAGGATTT
ATAGTGACTCGGGTTACAATTGGTTCGACTCTTGGGGCAGGGGAACCCTGGTCACCGTCT
CGAGT (SEQ ID NO: 424)
V_{L} with CDR1, CDR2 and CDR3 underlined
QTVVIQEPSFSVSPGGTVTLTCGLSSGSVSNSHYPSWYQQTPGQAPRTLIYSTNTRSSGVPDRF
SGSILGNKAALTITGAQADDESDFYCLLYLGSGISVFGGGTKLTVL (SEQ ID NO: 425)
CAGACTGTGGTGATCCAGGAGCCATCGTTCTCAGTGTCCCCTGGAGGGACAGTCACACTC
ACTTGTGGCTTGAGCTCTGGCTCAGTCTCTAATAGTCACTACCCCAGCTGGTATCAGCAG
ACCCCAGGCCAGGCTCCACGAACGCTCATCTACAGCACAAACACTCGCTCTTCTGGGGTC
CCTGATCGCTTCTCTGGCTCCATCCTTGGGAACAAAGCTGCCCTCACCATCACGGGGGCC
CAGGCGGATGATGAATCTGATTTTTACTGTCTGCTATATCTGGGTAGTGGCATTTCGGTAT
TCGGCGGAGGGACCAAGCTGACCGTCCTA (SEQ ID NO: 426)
Her2_S1R2A_CS_9E10
V_{H} with CDR1, CDR2 and CDR3 underlined
EVQLVQSGAEVKKPGESLKISCQGSGYTFASQWIAWVRQMPGQGLEWMGTIWPGDSNPTYS
PSFQGQVTISADKSISTAYLQWSSLKASDTAIYYCARLYNNYPYFYGMDVWGQGTMVTVSS (SEQ ID NO: 427)
GAGGTGCAGCTGGTGCAGTCTGGAGCAGAGGTGAAGAAGCCCGGGGAGTCTCTGAAGAT
CTCCTGTCAGGGTTCTGGATACACCTTTGCCAGCCAATGGATCGCCTGGGTGCGCCAGAT
GCCCGGGCAAGGCCTGGAGTGGATGGGGACCATCTGGCCTGGTGACTCTAATCCCACAT
ATAGCCCGTCCTTCCAAGGCCAGGTCACCATCTCAGCCGACAAGTCCATCAGCACCGCCT
ACCTGCAGTGGAGCAGCCTGAAGGCCTCGGACACCGCCATCTATTACTGTGCGAGGCTCT
ACAATAACTATCCCTACTTCTACGGTATGGACGTCTGGGGCCAGGGGACAATGGTCACCG
TCTCGAGT (SEQ ID NO: 428)
V_{L} with CDR1, CDR2 and CDR3 underlined
QTVVLQEPSFSVSPGGTVTLTCGLRSGSVSTTYYPSWYQQTPGQAPRTLIYSTNTRSSGVPDR
FSGSIVGNKAALTITGAQADDESDYYCALYLGSGTWVFGGGTKLTVL (SEQ ID NO: 429)
CAGACTGTGGTGCTCCAGGAGCCATCGTTCTCAGTGTCCCCTGGAGGGACAGTCACACTC
ACTTGTGGCTTGAGGTCTGGCTCAGTCTCTACTACTTACTACCCCAGCTGGTACCAGCAG
ACCCCAGGCCAGGCTCCACGCACGCTCATCTACAGCACAAACACTCGCTCTTCTGGGGTC
CCTGATCGCTTCTCTGGCTCCATCGTCGGGAACAAAGCTGCCCTCACCATCACGGGGGCC
CAGGCAGATGATGAATCTGATTATTACTGTGCGCTATACCTGGGTAGTGGCACTTGGGTG
TTCGGCGGAGGGACCAAGCTGACCGTCCTA (SEQ ID NO: 430)
Her2_S1R3A1_CS_7A10
V_{H} with CDR1, CDR2 and CDR3 underlined
EVQLVQSGAEVKKSGESLKISCKGSGYSFTSNWIGWVRQMPGKGLEWMGIIYPGDSDTRYSP
SFQGQVTISADKSVSTAYLQWSSLKASDTAMYYCARMLTDCSSTSCYSAGMDVWGKGTLV
TVSS (SEQ ID NO: 431)
GAGGTCCAGCTGGTGCAGTCTGGGGCAGAGGTGAAAAAGTCCGGGGAGTCTCTGAAGAT
CTCCTGTAAGGGTTCTGGATACAGCTTTACCAGTAATTGGATCGGCTGGGTGCGCCAGAT
GCCCGGGAAAGGCCTGGAGTGGATGGGGATCATCTATCCTGGTGACTCTGATACCAGAT
ACAGCCCGTCCTTCCAAGGCCAGGTCACCATCTCAGCCGACAAGTCCGTCAGCACCGCCT
ACCTGCAGTGGAGCAGCCTGAAGGCCTCGGACACCGCCATGTATTATTGTGCGAGAATG
CTGACGGACTGTAGTAGTACCAGCTGCTATTCAGCCGGTATGGACGTCTGGGGCAAAGG
CACCCTGGTCACCGTCTCGAGT (SEQ ID NO: 432)
V_{L} with CDR1, CDR2 and CDR3 underlined
QAVVIQEPSFSVSPGGTVTLTCGLSSGSVSPSYYPSWYQQTPGQAPRTLIYSTNTRSSGVPDRF
SGSILGNKAALTITGAQADDESDYYCVLYMGSGSWVFGGGTKLTVL (SEQ ID NO: 433)
CAGGCTGTGGTGATCCAGGAGCCATCGTTCTCAGTGTCCCCTGGAGGGACAGTCACACTC
ACTTGTGGCTTGAGTTCTGGCTCAGTCTCTCCTAGTTACTACCCCAGCTGGTACCAGCAG
ACCCCAGGCCAGGCTCCACGCACACTCATCTACAGCACAAACACTCGCTCTTCTGGGGTC
CCTGATCGCTTCTCTGGCTCCATCCTTGGGAACAAAGCTGCCCTCACCATCACGGGGGCC
CAGGCAGATGATGAATCTGATTATTACTGTGTGCTGTATATGGGTAGTGGCTCTTGGGTG
TTCGGCGGAGGGACCAAGCTGACCGTCCTA (SEQ ID NO: 434)
Her2_S1R3A1_BMV_6H7
V_{H} with CDR1, CDR2 and CDR3 underlined
QVQLVESGGGVVQPGRSLRLSCAASGFTFSSYAMNWVRQAPGKGLEWVATISYDGSNKYY
ADSVKGRFTISRDNSKNTLYLQMNSLRAEDTAVYYCARPAPYSSSGAFDIWGQGTLVTVSS (SEQ ID NO: 435)
CAGGTGCAGCTGGTGGAGTCTGGGGGAGGCGTGGTCCAGCCTGGGAGGTCCCTGAGACT
CTCCTGTGCAGCCTCTGGATTCACCTTCAGTAGCTATGCTATGAACTGGGTCCGCCAGGC
TCCAGGCAAGGGGCTGGAGTGGGTGGCAACTATATCATATGATGGAAGCAATAAATACT
ACGCAGACTCCGTGAAGGGCCGATTCACCATCTCCAGAGACAATTCCAAGAACACGCTG
TATCTGCAAATGAACAGCCTGAGAGCCGAGGACACGGCTGTGTATTACTGTGCGAGACC
GGCCCCGTATAGCAGCTCCGGCGCTTTTGATATCTGGGGCCAAGGCACCCTGGTCACCGT
CTCTTCA (SEQ ID NO: 436)
V_{L} with CDR1, CDR2 and CDR3 underlined
DIQMTQSPSTLSASIGDRVTITCRASEGIYHWLAWYQQKPGKAPKLLTYKASSLASGAPSRFS
GSGSGTDFTLTISSLQPDDFATYYCQQYSNYPLT FGGGTKLEIKR (SEQ ID NO: 437)
GACATCCAGATGACCCAGTCTCCTTCCACCCTGTCTGCATCTATTGGAGACAGAGTCACC
ATCACCTGCCGGGCCAGTGAGGGTATTTATCACTGGTTGGCCTGGTATCAGCAGAAGCCA
GGGAAAGCCCCTAAACTCCTGACCTATAAGGCCTCTAGTTTAGCCAGTGGGGCCCCATCA
AGGTTCAGCGGCAGTGGATCTGGGACAGATTTCACTCTCACCATCAGCAGCCTGCAGCCT
GATGATTTTGCAACTTATTACTGCCAACAATATAGTAATTATCCGCTCACTTTCGGCGGA
GGGACCAAGCTGGAGATCAAACGT (SEQ ID NO: 438)
Her2_S1R3A1_CS_12A11
V_{H} with CDR1, CDR2 and CDR3 underlined
QVQLVQSGGEVKKPGESLKISCKVSGDKFANYWIAWVRQVPGRGLEWMGIIYPSDSDVRYS
PSFQGQVTMSADKSTSTAYLQLSSLKASDTAMYYCARQVGGLVTTDTDSYFYGMDVWGQG
TLVTVSS (SEQ ID NO: 439)
CAGGTCCAGCTGGTGCAGTCTGGAGGAGAGGTGAAAAAGCCCGGGGAGTCTCTGAAGAT
CTCCTGTAAGGTTTCTGGAGACAAGTTTGCCAACTACTGGATCGCCTGGGTGCGCCAGGT
GCCCGGGAGAGGCCTGGAGTGGATGGGAATCATCTATCCTAGTGACTCTGATGTCAGAT
ATAGTCCGTCCTTCCAAGGCCAAGTCACCATGTCAGCCGACAAGTCCACCAGCACCGCCT
ACTTGCAGTTGAGCAGCCTGAAGGCCTCGGACACCGCCATGTATTACTGTGCAAGACAG
GTGGGTGGACTGGTTACTACAGACACTGACTCCTACTTCTACGGCATGGACGTCTGGGGC
CAAGGAACCCTGGTCACCGTCTCGAGT (SEQ ID NO: 440)
V_{L} with CDR1, CDR2 and CDR3 underlined
QAVVIQEPSFSVSPGGTVTLTCGLSSGPVSTSYYPSWFQQTPGQAPRTLIYSTNTRSSGVPDRF
SGSILGNKAALTITGAQADDESDYYCVLYVGSGISLFGGGTKVTVL (SEQ ID NO: 441)
CAGGCTGTGGTGATCCAGGAGCCATCGTTCTCAGTGTCCCCTGGAGGGACAGTCACACTC
ACTTGTGGCTTGAGCTCTGGCCCAGTCTCTACTAGTTACTACCCCAGCTGGTTCCAACAG
ACCCCAGGCCAGGCTCCACGCACGCTCATCTACAGCACAAACACTCGCTCTTCTGGGGTC
CCTGATCGCTTCTCTGGCTCCATCCTTGGGAACAAAGCTGCCCTCACCATCACGGGGGCC
CAGGCAGATGATGAATCTGATTATTACTGTGTGTTGTATGTGGGTAGTGGCATTTCGCTA
TTCGGCGGGGGGACCAAGGTCACCGTCCTA (SEQ ID NO: 442)
Her2_S1R3A1_CS_13D12
V_{H} with CDR1, CDR2 and CDR3 underlined
QVQLVQSGGEVKKPGESLKISCKVSGDSFTNYWIAWVRQMPGRGLEWMGIIYPSDSDVRYS
PSFQGQVTMSADKSISTAYLQLSSLKASDTAMYYCARQVGGLVTTDTDSYFYGMDVWGRG
TLVTVSS (SEQ ID NO: 443)
CAGGTCCAGCTGGTGCAGTCTGGAGGAGAGGTGAAAAAGCCCGGGGAGTCTCTGAAGAT
CTCCTGTAAGGTTTCTGGAGACAGCTTTACCAACTACTGGATCGCCTGGGTGCGCCAGAT
GCCCGGGAGAGGCCTGGAGTGGATGGGAATCATCTATCCTAGTGACTCTGATGTCAGAT
ATAGTCCGTCCTTCCAAGGCCAGGTCACCATGTCAGCCGACAAGTCCATCAGCACCGCCT
ACCTGCAGTTGAGCAGCCTGAAGGCCTCGGACACCGCCATGTATTACTGTGCAAGACAG
GTGGGTGGACTGGTTACTACAGACACTGACTCCTACTTCTACGGCATGGACGTCTGGGGC
AGAGGCACCCTGGTCACCGTCTCGAGT (SEQ ID NO: 444)
V_{L} with CDR1, CDR2 and CDR3 underlined
QTVVIQEPSFSVSPGGTVTLTCALNSGSVSTNYYPSWYQQTPGQAPRTLIHSTNTRSSGVPDRF
SGSILGNNAALTITGAQAEDESDYYCALYMGSGISIFGGGTKLTVL (SEQ ID NO: 445)
CAGACTGTGGTGATCCAGGAGCCATCGTTCTCAGTGTCCCCTGGAGGGACAGTCACACTC
ACTTGTGCCTTGAACTCCGGCTCAGTCTCTACTAATTACTACCCCAGCTGGTACCAGCAG
ACCCCAGGCCAGGCTCCACGCACGCTCATCCACAGCACAAACACTCGCTCTTCTGGGGTC
CCTGATCGCTTCTCTGGCTCCATCCTTGGGAACAATGCTGCCCTCACCATCACGGGGGCC
CAGGCAGAGGATGAATCTGATTATTACTGTGCGCTATATATGGGTAGTGGCATTTCGATA
TTCGGCGGAGGGACCAAGCTGACCGTCCTA (SEQ ID NO: 446)
Her2_S1R3A1_CS_7A8
V_{H} with CDR1, CDR2 and CDR3 underlined
QVQLQESGPGLVEPSETLSLTCSVSGGSISSSSSSWGWIRQPPGKGLEWIGSIYYSGETYYNPS
LKRRVTISTDTSKNQLSLELASVTAADTAVYYCARQVTSYGSDYFDYWGKGTLVTVSS (SEQ ID NO: 447)
CAGGTGCAGCTGCAGGAGTCGGGCCCAGGACTGGTGGAGCCTTCGGAGACCCTGTCCCT
CACCTGCAGTGTCTCTGGCGGCTCCATCAGCAGCAGTAGTTCCTCTTGGGGCTGGATCCG
CCAGCCCCCAGGGAAGGGGCTGGAGTGGATTGGGAGTATCTATTACAGTGGAGAAACCT
ATTATAATCCGTCCCTCAAGAGGCGTGTCACCATATCCACAGACACGTCCAAGAACCAGT
TGTCCCTGGAGCTGGCCTCTGTGACCGCCGCAGACACGGCTGTATATTACTGTGCGAGGC
AAGTCACCAGTTATGGTTCTGACTACTTTGACTACTGGGGCAAAGGAACCCTGGTCACCG
TCTCGAGT (SEQ ID NO: 448)
V_{L} with CDR1, CDR2 and CDR3 underlined
QAVVIQEPSFSVSPGGTVTLTCGLSSGSVSSNYYPSWYQQTPGQTPRTLIYNTNTRSSGVPDRF
SGSILGNKAALTITGAQADDESDYYCVLYMGSGIRVFGGGTKVTVL (SEQ ID NO: 449)
CAGGCTGTGGTGATCCAGGAGCCATCGTTCTCAGTGTCCCCTGGAGGGACAGTCACACTT
ACTTGTGGCTTGAGCTCTGGCTCAGTCTCTTCTAATTACTACCCCAGCTGGTACCAGCAG
ACCCCAGGCCAGACTCCACGCACGCTCATCTACAACACAAACACTCGCTCTTCTGGGGTC
CCTGATCGCTTCTCTGGCTCCATCCTTGGGAACAAAGCTGCCCTCACCATCACGGGGGCC
CAGGCAGATGATGAATCTGATTATTACTGTGTGTTGTATATGGGTAGTGGCATTCGCGTG
TTCGGCGGAGGGACCAAGGTCACCGTCCTA (SEQ ID NO: 450)
Her2_S1R2A_CS_2C9
V_{H} with CDR1, CDR2 and CDR3 underlined
EVQLVQSGAEVRKPGASVKVSCRSSGYTFTTYYLHWLRQAPGQGLEWMGVINPSGGATAY
AQSFQGRVTMTRDTATSTVYLDLSSLRTEDTAVYYCARSTPAEQLVPGFWGKGTMVTVSS (SEQ ID NO: 451)
GAAGTGCAGCTGGTGCAGTCTGGGGCTGAGGTGAGGAAGCCTGGGGCCTCAGTGAAGGT
TTCCTGCAGGTCATCTGGATACACCTTCACCACCTACTATTTGCACTGGCTACGACAGGC
CCCTGGACAAGGGCTTGAGTGGATGGGAGTAATTAACCCTAGCGGCGGTGCCACAGCCT
ACGCGCAGAGTTTCCAGGGCAGAGTCACCATGACCAGGGACACGGCTACGAGCACAGTC
TATTTGGATCTGAGCAGCCTGAGAACTGAAGACACGGCCGTGTATTACTGTGCGAGATCC
ACCCCGGCGGAGCAGCTCGTCCCGGGCTTCTGGGGCAAAGGGACAATGGTCACCGTCTC
GAGT (SEQ ID NO: 452)
V_{L} with CDR1, CDR2 and CDR3 underlined
EIVMTQSPATLSVSPGDRATLSCRASQSVSTNVAWYQQKPGQPPRLLIYGASTRASGVPARFS
GSGSGTEFTLTISSLQSEDFAVYYCQQYGDWPPITFGQGTRLEIKR (SEQ ID NO: 453)
GAAATTGTGATGACGCAGTCTCCAGCCACCCTGTCTGTGTCTCCAGGGGACAGAGCCACC
CTCTCCTGCAGGGCCAGTCAGAGTGTTAGCACCAACGTAGCCTGGTACCAGCAGAAACC
TGGCCAACCTCCCAGGCTCCTCATCTATGGTGCATCCACCAGGGCCTCTGGTGTCCCAGC
CAGGTTCAGTGGCAGTGGGTCTGGGACAGAGTTCACTCTCACCATCAGCAGTCTGCAGTC
TGAAGATTTTGCAGTTTATTACTGTCAACAGTATGGTGACTGGCCTCCGATCACCTTCGG
CCAAGGGACACGACTGGAGATTAAACGT (SEQ ID NO: 454)
Her2_S1R3A1_CS_12D1
V_{H} with CDR1, CDR2 and CDR3 underlined
EVQLVESGGGLVQPGGSLKLSCAASGLNFDISTVHWVRQASGKGLEWIGRIRSKAYNYATA
YTESLKGRFIISRDESKNTADLQINSLKTEDTATYYCSMTFGDYYYYGMDVWGRGTLVTVSS (SEQ ID NO: 455)
GAGGTGCAGCTGGTGGAGTCCGGGGGAGGCTTGGTCCAGCCGGGGGGGTCCCTAAAACT
TTCCTGTGCAGCCTCTGGGCTCAATTTCGATATCTCTACTGTGCACTGGGTCCGCCAGGCT
TCCGGGAAAGGGCTGGAGTGGATTGGCCGTATTAGAAGCAAAGCTTACAATTATGCGAC
AGCATATACTGAGTCGCTGAAGGGCAGGTTCATCATCTCCAGAGATGAGTCAAAGAATA
CGGCGGATCTGCAAATCAACAGCCTGAAAACCGAGGACACGGCCACATATTACTGTAGT
ATGACCTTCGGTGACTACTACTACTACGGCATGGACGTCTGGGGCCGGGGCACCCTGGTC
ACCGTCTCGAGT (SEQ ID NO: 456)
V_{L} with CDR1, CDR2 and CDR3 underlined
QAVLTQPSSVSGAPGQRVTITCTGSSSNIGAGYDVHWYQQLPGTAPKLLIYSNSYRPSGVSDR
FSGSKSGTSASLVIAGLQAEDEADYYCQSYDSSHWFFGGGTKLTVL (SEQ ID NO: 457)
CAGGCTGTGCTGACTCAGCCGTCCTCAGTGTCTGGGGCCCCAGGGCAGAGGGTCACCATC
ACCTGCACTGGAAGCAGCTCCAACATCGGGGCCGGTTACGATGTTCACTGGTACCAGCA
ACTTCCAGGAACAGCCCCCAAACTCCTCATCTATAGTAATTCTTATCGGCCCTCTGGGGT
CTCTGACCGATTCTCTGGCTCCAAGTCTGGCACCTCAGCCTCCCTGGTCATCGCTGGACTC
CAGGCTGAGGATGAGGCTGATTATTACTGTCAGTCCTATGACAGCAGTCATTGGTTTTTC
GGCGGAGGGACCAAGCTGACCGTCCTA (SEQ ID NO: 458)
Her2_S1R2A_CS_7D4
V_{H} with CDR1, CDR2 and CDR3 underlined
QVQLQQSGAEVKKPGASVKVSCKVSGYTPPDLSIHWVRQAPGEGLEWMGRFDFEDGETINA
QKFQGRVTMTADTSTNTGYMEVSSLRFEDTAVYYCATTLRFSGYYYGMDFWGRGTLVTVSS (SEQ ID NO: 459)
CAGGTACAGCTGCAGCAGTCAGGGGCTGAGGTGAAGAAGCCTGGGGCCTCAGTGAAGGT
CTCCTGCAAGGTTTCCGGATACACCCCCCCTGATTTATCCATCCACTGGGTGCGACAGGC
TCCTGGAGAAGGGCTTGAGTGGATGGGACGTTTTGATTTTGAAGATGGTGAAACAATCA
ACGCACAGAAGTTCCAGGGCAGAGTCACCATGACCGCGGACACATCCACAAACACAGGC
TACATGGAGGTGAGCAGCCTGAGATTTGAGGACACGGCCGTGTATTACTGTGCAACAAC
ACTTCGATTTTCTGGTTACTACTACGGTATGGACTTCTGGGGCCGAGGAACCCTGGTCAC
CGTCTCGAGT (SEQ ID NO: 460)
V_{L} with CDR1, CDR2 and CDR3 underlined
QAVVIQEPSLSVSPGGTVTLTCALSSGSVSTGYYPSWYQQTPGQAPRTLIYNTDTRSSGVPGR
FSGSILGDKAALTITGAQADDESDYYCVLYMGSGIWVFGGGTKVTVL (SEQ ID NO: 461)
CAGGCTGTGGTGATCCAGGAGCCATCGCTCTCAGTGTCCCCTGGAGGGACAGTCACACTC
ACTTGTGCCTTGAGCTCTGGCTCAGTCTCCACTGGTTACTACCCCAGCTGGTACCAGCAG
ACCCCAGGCCAGGCTCCACGCACGCTCATTTACAACACAGACACTCGCTCTTCTGGGGTC
CCTGGTCGCTTCTCTGGCTCCATCCTTGGGGACAAAGCTGCCCTCACCATCACGGGGGCC
CAGGCAGATGATGAATCTGATTATTACTGTGTGCTGTATATGGGTAGTGGCATTTGGGTG
TTCGGCGGAGGGACCAAGGTCACCGTCCTA (SEQ ID NO: 462)
Her2_S1R3A1_CS_15B8
V_{H} with CDR1, CDR2 and CDR3 underlined
EVQLVQSGAEVKKPGESLKISCKGSGYNFNTHWIGWVRQMPGKGLEWMGLIYPDDSDTRFS
PSFEGQVTLSADRSISTAYLQWTSLKASDTAMYYCARYKKSSGYYTGYGMDVWGRGTMVT
VSS (SEQ ID NO: 463)
GAAGTGCAGCTGGTGCAGTCTGGAGCAGAGGTGAAAAAGCCCGGGGAGTCTCTGAAGAT
CTCCTGTAAGGGTTCTGGATACAACTTTAACACTCACTGGATCGGGTGGGTGCGCCAGAT
GCCCGGGAAAGGCCTGGAGTGGATGGGGCTCATCTACCCTGATGACTCTGACACCCGAT
TCAGCCCGTCCTTCGAAGGCCAGGTCACCCTCTCAGCCGACAGGTCCATCAGTACCGCCT
ACCTGCAGTGGACCAGCCTGAAGGCCTCGGACACCGCCATGTATTACTGTGCGAGATAC
AAAAAAAGTAGTGGTTATTACACAGGATATGGTATGGACGTCTGGGGCCGAGGGACAAT
GGTCACCGTCTCGAGT (SEQ ID NO: 464)
V_{L} with CDR1, CDR2 and CDR3 underlined
QTVVIQEPSFSVSPGGTVTLTCGLSSGSVSTSYYPTWYQQTPGQAPRTLIYSTNSRFSGVPDRF
SGSILGSKAALTITGAQADDESDYYCVLYMGSGISVFGGGTKVTVL (SEQ ID NO: 465)
CAGACTGTGGTGATCCAGGAGCCATCGTTCTCAGTGTCCCCTGGAGGGACAGTCACACTC
ACTTGTGGCTTGAGCTCTGGCTCAGTCTCTACTAGTTACTACCCCACCTGGTACCAGCAG
ACCCCAGGCCAGGCTCCACGCACGCTCATCTATAGCACAAACAGTCGCTTTTCTGGGGTC
CCTGATCGCTTCTCTGGCTCCATCCTTGGGAGCAAAGCTGCCCTCACCATCACGGGGGCC
CAGGCAGATGATGAATCTGATTATTACTGTGTGCTATATATGGGTAGTGGCATTTCGGTG
TTCGGCGGAGGGACCAAGGTCACCGTCCTA (SEQ ID NO: 466)
Her2_S6R3_DP47_1A10
V_{H} with CDR1, CDR2 and CDR3 underlined
EVQLLESGGGLVQPGGSLRLSCAASGFTFSSYAMSWVRQAPGKGLEWVSAISGSGGSTYYA
DSVKGRFTISRDNSKNTLYLQMNSLRAEDTAVYYCATSLGYGDFDYWGRGTTVTVSS (SEQ ID NO: 467)
GAGGTGCAGCTGTTGGAGTCTGGGGGAGGCTTGGTACAGCCTGGGGGGTCCCTGAGACT
CTCCTGTGCAGCCTCTGGATTCACCTTTAGCAGCTATGCCATGAGCTGGGTCCGCCAGGC
TCCAGGGAAGGGGCTGGAGTGGGTCTCAGCTATTAGTGGTAGTGGTGGTAGCACATACT
ACGCAGACTCCGTGAAGGGCCGGTTCACCATCTCCAGAGACAATTCCAAGAACACGCTG
TATCTGCAAATGAACAGCCTGAGAGCCGAGGACACGGCCGTGTATTACTGTGCAACTTC
GTTGGGTTACGGTGACTTTGACTACTGGGGGCGAGGGACCACGGTTACCGTCTCGAGT (SEQ ID NO: 468)
V_{L} with CDR1, CDR2 and CDR3 underlined
QAVLTQPSSASGAPGHRVIISCSGSSSNIGSYYVSWYQQLPGAAPKLLIYRNDERPSGVPARFS
GSTSGTSASLAISGLHSEDEADYYCAAWDDSLNGPVFGGGTKVTVL (SEQ ID NO: 469)
CAGGCTGTGCTGACTCAGCCGTCCTCAGCGTCTGGGGCCCCCGGGCACAGGGTCATCATC
TCTTGTTCTGGAAGCAGCTCCAACATCGGAAGTTATTATGTAAGCTGGTACCAGCAGCTC
CCAGGAGCGGCCCCCAAACTCCTCATCTATCGTAATGATGAGCGGCCCTCAGGGGTCCCT
GCCCGATTCTCTGGCTCCACGTCTGGCACCTCAGCCTCCCTGGCCATCAGTGGGCTCCAC
TCTGAGGATGAGGCTGATTATTATTGTGCAGCATGGGATGACAGCCTGAATGGTCCGGTT
TTCGGCGGAGGGACCAAGGTCACCGTCCTA (SEQ ID NO: 470)
Her2_S6R2_DP47_1E11
V_{H} with CDR1, CDR2 and CDR3 underlined
EVQLLESGGGLVQPGGSLRLSCAASGFTFSSYAMSWVRQAPGKGLEWVSAISGSGGSTYYA
DSVKGRFTISRDNSKNTLYLQMNSLRAEDTAVYYCAVHGYGDSVDDALDVWGRGTLVTVSS (SEQ ID NO: 471)
GAGGTGCAGCTGTTGGAGTCTGGGGGAGGCTTGGTACAGCCTGGGGGGTCCCTGAGACT
CTCCTGTGCAGCCTCTGGATTCACCTTTAGCAGCTATGCCATGAGCTGGGTCCGCCAGGC
TCCAGGGAAGGGGCTGGAGTGGGTCTCAGCTATTAGTGGTAGTGGTGGTAGCACATACT
ACGCAGACTCCGTGAAGGGCCGGTTCACCATCTCCAGAGACAATTCCAAGAACACGCTG
TATCTGCAAATGAACAGCCTGAGAGCCGAGGACACGGCCGTGTATTACTGTGCGGTCCA
TGGCTACGGAGACTCCGTGGATGATGCTCTTGATGTCTGGGGCCGAGGAACCCTGGTCAC
CGTCTCGAGT (SEQ ID NO: 472)
V_{L} with CDR1, CDR2 and CDR3 underlined
QSVLTQPPSASGTPGQTISISCSGSNSNIGTYSVSWYQQLPRAAPRLLVYANDRRPSGVPDRFS
GSKSGTSASLAISGLQSEDEADYYCAVWDDRLNGFVFGTGTKLTVL (SEQ ID NO: 473)
CAGTCTGTGCTGACGCAGCCGCCCTCAGCGTCTGGGACCCCCGGGCAGACGATCTCCATC
TCTTGTTCTGGAAGCAACTCCAACATCGGAACTTATAGTGTTAGCTGGTACCAGCAGCTC
CCACGAGCGGCCCCCAGACTCCTCGTCTATGCTAATGATCGCCGGCCCTCAGGGGTCCCT
GACCGATTCTCTGGCTCCAAGTCTGGCACCTCAGCCTCCCTGGCCATCAGTGGGCTCCAG
TCTGAGGATGAGGCTGATTATTACTGTGCAGTATGGGATGACAGGTTGAATGGTTTTGTC
TTCGGAACTGGGACCAAGCTGACCGTCCTA (SEQ ID NO: 474)
Her2_S5R2_DP47_1H11
V_{H} with CDR1, CDR2 and CDR3 underlined
EVQLLESGGGLVQPGGSLRLSCAASGFTFSSYAMSWVRQAPGKGLEWVSAISGSGGSTYYA
DSVKGRFTISRDNSKNTLYLQMNSLRAEDTAVYYCARDDDFWSGYPFLYYYYGMDVWGRG
TMVTVSS (SEQ ID NO: 475)
GAGGTGCAGCTGTTGGAGTCTGGGGGAGGCTTGGTACAGCCTGGGGGGTCCCTGAGACT
CTCCTGTGCAGCCTCTGGATTCACCTTTAGCAGCTATGCCATGAGCTGGGTCCGCCAGGC
TCCAGGGAAGGGGCTGGAGTGGGTCTCAGCTATTAGTGGTAGTGGTGGTAGCACATACT
ACGCAGACTCCGTGAAGGGCCGGTTCACCATCTCCAGAGACAATTCCAAGAACACGCTG
TATCTGCAAATGAACAGCCTGAGAGCCGAGGACACGGCCGTGTATTACTGTGCGAGAGA
TGACGATTTTTGGAGTGGTTATCCATTCCTCTACTACTACTACGGTATGGACGTCTGGGGC
CGAGGGACAATGGTCACCGTCTCGAGT (SEQ ID NO: 476)
V_{L} with CDR1, CDR2 and CDR3 underlined
QSVVTQPPSASGTPGQRVTISCSGTSSNIGSNAVNWYQQLPGTAPKLLIYNNNQRPSGVPDRF
SGSKSGTSASLAISGLQSEDEADYYCAAWDDSLNVYVVFGGGTKLTVL (SEQ ID NO: 477)
CAGTCTGTCGTGACGCAGCCGCCCTCAGCGTCTGGGACCCCCGGGCAGAGGGTCACCAT
CTCTTGTTCTGGAACTAGTTCCAACATCGGAAGTAATGCTGTAAACTGGTACCAGCAACT
CCCAGGAACGGCCCCCAAACTCCTCATCTATAATAATAATCAGCGGCCCTCAGGGGTCCC
TGACCGATTCTCTGGCTCCAAGTCTGGCACCTCAGCCTCCCTGGCCATCAGTGGACTCCA
GTCTGAGGATGAGGCTGATTATTACTGTGCAGCATGGGATGACAGCCTGAATGTTTATGT
GGTATTCGGCGGAGGGACCAAGCTGACCGTCCTA (SEQ ID NO: 478)
Her2_S6R3_CS_1G5
V_{H} with CDR1, CDR2 and CDR3 underlined
QVQLQESGPGLVKPSETLSLTCTVSGGSITSDLSYWGWLRQPPGKGLEWIASGGDGESTYYN
PSLNGRVTFSVDTPKNQFSLRLSSVTAADTAVYYCARHPLYYCSGGRCYSGNFDFWGQGTL
VTVSS (SEQ ID NO: 479)
CAGGTGCAGCTGCAGGAGTCGGGCCCAGGACTGGTGAAGCCTTCGGAGACCCTGTCCCT
CACCTGCACTGTCTCTGGTGGCTCCATCACCAGTGATCTTTCCTACTGGGGCTGGCTCCGC
CAGCCCCCCGGGAAGGGTCTGGAGTGGATTGCGAGTGGTGGTGACGGTGAGAGCACCTA
CTACAACCCGTCCCTCAACGGTCGAGTCACCTTTTCCGTGGACACGCCCAAGAACCAATT
CTCCCTGAGGCTGAGCTCTGTGACCGCCGCAGACACGGCTGTATATTACTGTGCGAGACA
CCCACTCTACTATTGTAGTGGTGGTCGCTGCTACTCCGGGAACTTTGACTTTTGGGGCCA
GGGAACCCTGGTCACCGTCTCGAGT (SEQ ID NO: 480)
V_{L} with CDR1, CDR2 and CDR3 underlined
QAVLTQPSSASGTPGQRVTISCSGTTPNIGSNFVYWYQQLPGTAPKLLIYRNEQRPSGVPVRFS
GSKSGTSASLAISDLRSEDEADYYCAAWDDSLSGVVFGGGTKLTVL (SEQ ID NO: 481)
CAGGCTGTGCTGACTCAGCCGTCCTCAGCGTCTGGGACCCCCGGTCAGAGGGTCACCATT
TCTTGTTCTGGAACGACCCCCAATATTGGAAGTAATTTTGTCTACTGGTATCAACAACTCC
CAGGGACGGCCCCCAAACTCCTCATCTACAGGAATGAGCAGCGCCCTTCAGGGGTCCCT
GTCCGATTCTCTGGCTCCAAGTCTGGCACATCAGCCTCCCTGGCCATCAGTGACCTCCGG
TCCGAGGATGAGGCTGACTATTACTGTGCAGCGTGGGATGACAGCCTGAGTGGTGTGGT
CTTCGGCGGGGGGACCAAGCTGACCGTCCTA (SEQ ID NO: 482)
Her2_S6R2_DP47_1H11
V_{H} with CDR1, CDR2 and CDR3 underlined
EVQLLESGGGLVQPGGSLRLSCAASGFTFSSYAMSWVRQAPGKGLEWVSAISGSGGSTYYA
DSVKGRFTISRDNSKNTLYLQMNSLRAEDTAVYYCAKYGGYDADAFDVWGRGTMVTVSS (SEQ ID NO: 483)
GAGGTGCAGCTGTTGGAGTCTGGGGGAGGCTTGGTACAGCCTGGGGGGTCCCTGAGACT
CTCCTGTGCAGCCTCTGGATTCACCTTTAGCAGCTATGCCATGAGCTGGGTCCGCCAGGC
TCCAGGGAAGGGGCTGGAGTGGGTCTCAGCTATTAGTGGTAGTGGTGGTAGCACATACT
ACGCAGACTCCGTGAAGGGCCGGTTCACCATCTCCAGAGACAATTCCAAGAACACGCTG
TATCTGCAAATGAACAGCCTGAGAGCCGAGGACACGGCCGTGTATTACTGTGCGAAGTA
TGGTGGCTACGACGCTGATGCCTTTGATGTCTGGGGCCGAGGGACAATGGTCACCGTCTC
GAGT (SEQ ID NO: 484)
V_{L} with CDR1, CDR2 and CDR3 underlined
QSVVTQPPSVSAAPGQKVTISCSGSSSNIGDYYVSWYQQLPGTAPTLLIYDNDKRPSEVPDRF
SGSKSGTSATLGITGLQTGDEADYYCTSWDSSLSAGVFGGGTKVTVL (SEQ ID NO: 485)
CAGTCTGTCGTGACGCAGCCGCCCTCAGTGTCTGCGGCCCCAGGACAGAAGGTCACCATC
TCCTGCTCTGGAAGTAGCTCCAACATTGGAGATTATTATGTATCCTGGTACCAGCAACTC
CCAGGAACGGCCCCCACACTCCTCATTTATGACAATGATAAGCGACCCTCAGAAGTTCCT
GACCGATTCTCTGGCTCCAAGTCTGGCACGTCGGCCACCCTCGGCATCACCGGACTCCAG
ACTGGGGACGAGGCCGATTATTACTGCACTTCATGGGATAGCAGCCTGAGTGCTGGGGT
GTTCGGCGGAGGGACCAAGGTCACCGTCCTA (SEQ ID NO: 486)
Her2_S5R3_DP47_1A10
V_{H} with CDR1, CDR2 and CDR3 underlined
EVQLLESGGGLVQPGGSLRLSCAASGFTFSSYAMSWVRQAPGKGLEWVSAISGSGGSTYYA
DSVKGRFTISRDNSKNTLYLQMNSLRAEDTAVYYCAKWGWDYYDTTGHDAFDFWGRGTM
VTVSS (SEQ ID NO: 487)
GAGGTGCAGCTGTTGGAGTCTGGGGGAGGCTTGGTACAGCCTGGGGGGTCCCTGAGACT
CTCCTGTGCAGCCTCTGGATTCACCTTTAGCAGCTATGCCATGAGCTGGGTCCGCCAGGC
TCCAGGGAAGGGGCTGGAGTGGGTCTCAGCTATTAGTGGTAGTGGTGGTAGCACTTACT
ACGCAGACTCCGTGAAGGGCCGGTTCACCATCTCCAGAGACAATTCCAAGAACACGCTG
TATCTGCAAATGAACAGCCTGAGAGCCGAGGACACGGCCGTGTATTACTGTGCTAAATG
GGGCTGGGATTACTATGACACAACTGGTCATGATGCCTTTGATTTCTGGGGCCGGGGGAC
AATGGTCACCGTCTCGAGT (SEQ ID NO: 488)
V_{L} with CDR1, CDR2 and CDR3 underlined
QAVLTQPSSVSGAPGQRVTISCTGSSSNIGADYYVNWYQQLPGKAPEIVIFNDDNRPSGVPNR
FSGSKSGTSASLAITGLQAEDEADYYCQSYDSVLSAYVFGTGTKVTVL (SEQ ID NO: 489)
CAGGCTGTGCTGACTCAGCCGTCCTCAGTGTCTGGGGCCCCAGGGCAGAGGGTCACCATC
TCCTGCACTGGGAGCAGCTCCAACATCGGGGCAGATTATTATGTAAATTGGTATCAGCAA
CTTCCAGGAAAAGCCCCCGAAATCGTAATTTTTAATGATGACAATCGGCCCTCAGGGGTC
CCTAACCGATTCTCTGGCTCCAAGTCTGGCACCTCAGCCTCCCTGGCCATCACTGGGCTC
CAGGCTGAAGATGAGGCTGATTATTATTGCCAGTCTTATGACAGTGTCCTGAGTGCTTAT
GTCTTCGGAACTGGGACCAAGGTCACCGTCCTA (SEQ ID NO: 490)
Her2_S5R2_DP47_1D11
V_{H} with CDR1, CDR2 and CDR3 underlined
EVQLLESGGGLVQPGGSLRLSCAASGFTFSSYTMSWVRQAPGKGLEWVSAISGSGGSTYYAD
SVKGRFTISRDNSKNTLYLQMNSLRAEDTAVYYCARNSSNWSGAFDIWGRGTTVTVSS (SEQ ID NO: 491)
GAGGTGCAGCTGTTGGAGTCTGGGGGAGGCTTGGTACAGCCTGGGGGGTCCCTGAGACT
CTCCTGTGCAGCCTCTGGATTCACCTTTAGCAGCTATACCATGAGCTGGGTCCGCCAGGC
TCCAGGGAAGGGGCTGGAGTGGGTCTCAGCTATTAGTGGTAGTGGTGGTAGCACATACT
ACGCAGACTCCGTGAAGGGCCGGTTCACCATCTCCAGAGACAATTCCAAGAACACGCTG
TATCTGCAAATGAACAGCCTGAGAGCCGAGGACACGGCCGTGTATTACTGTGCAAGGAA
TAGCAGCAATTGGAGTGGTGCTTTTGATATCTGGGGGCGGGGGACCACGGTCACCGTCTC
GAGT (SEQ ID NO: 492)
V_{L} with CDR1, CDR2 and CDR3 underlined
QSVLTQPPSVSGAPGQRVTISCIGTHSNIGAGYAVNWYQQLPGTAPKLLIYGNNNRPSGVPDR
FSGSKSGTSASLAINGLQADDESDYYCQSYDASLRVLFGGGTKLTVL (SEQ ID NO: 493)
CAGTCTGTGCTGACGCAGCCGCCCTCAGTGTCTGGGGCCCCAGGGCAGAGGGTCACCAT
CTCCTGCATTGGAACCCACTCAAACATCGGGGCAGGTTACGCTGTGAACTGGTACCAGCA
GCTTCCAGGAACAGCCCCCAAACTCCTCATCTATGGTAATAACAATCGGCCCTCAGGGGT
CCCTGACCGATTCTCTGGCTCCAAGTCTGGCACCTCAGCCTCCCTGGCCATCAATGGGCT
CCAGGCTGACGATGAGTCTGATTATTATTGCCAGTCCTATGACGCCAGTCTGAGAGTTTT
ATTCGGCGGAGGGACCAAGCTGACCGTCCTA (SEQ ID NO: 494)
Her2_S5R2_CS_1A8
V_{H} with CDR1, CDR2 and CDR3 underlined
EVQLVQSGAEVKKPGESLKISCKGSGYSFSNYWIGWVRQMPGKGLEWMGIIYPGDSDTRYSP
SFQGQVTISADKSISTAYLQWSSLKASDSAMYYCARHDSTMGYDAFHMWGQGTLVTVSS (SEQ ID NO: 495)
GAGGTGCAGCTGGTGCAGTCTGGGGCAGAGGTGAAAAAGCCCGGGGAGTCTCTGAAGAT
CTCCTGTAAGGGTTCTGGGTACAGCTTTAGTAACTACTGGATCGGCTGGGTGCGCCAGAT
GCCCGGGAAAGGCCTGGAGTGGATGGGGATCATCTATCCTGGTGACTCTGATACCAGAT
ACAGCCCGTCCTTCCAAGGCCAGGTCACCATCTCAGCCGACAAGTCCATCAGTACCGCCT
ACCTGCAGTGGAGCAGCCTGAAGGCCTCGGACAGTGCCATGTATTACTGTGCGAGACAT
GATTCGACTATGGGATATGATGCTTTTCATATGTGGGGCCAAGGAACCCTGGTCACCGTC
TCGAGT (SEQ ID NO: 496)
V_{L} with CDR1, CDR2 and CDR3 underlined
QAVLTQPSSVSGAPGQRVTISCTGSSSNIGAGYDVHWYQQLPGTAPKLLIYGNSNRPSGVPDR
FSGSKSGTSASLAITGLQAEDEADYYCQSYDSSLSGPVVFGGGTKLTVL (SEQ ID NO: 497)
CAGGCTGTGCTGACTCAGCCGTCCTCAGTGTCTGGGGCCCCAGGGCAGAGGGTCACCATC
TCCTGCACTGGGAGCAGCTCCAACATCGGGGCAGGTTATGATGTACACTGGTACCAGCA
GCTTCCAGGAACAGCCCCCAAACTCCTCATCTATGGTAACAGCAATCGGCCCTCAGGGGT
CCCTGACCGATTCTCTGGCTCCAAGTCTGGCACCTCAGCCTCCCTGGCCATCACTGGGCT
CCAGGCTGAGGATGAGGCTGATTATTACTGCCAGTCCTATGACAGCAGCCTGAGTGGCCC
TGTGGTATTCGGCGGAGGGACCAAGCTGACCGTCCTA (SEQ ID NO: 498)
Her2_S6R3_CS_1B7
V_{H} with CDR1, CDR2 and CDR3 underlined
QVQLVQSGAEIKKPGESLKISCEGSGYRFTSHWIGWVRQMPGKGLEWMGIIYPGDSDTRYSP
SFQGQVTISADKSISTAYLQWSSLKASDTAMYYCARHSATHDAFDIWGRGTLVTVSS (SEQ ID NO: 499)
CAGGTGCAGCTGGTGCAGTCTGGGGCAGAAATAAAAAAGCCGGGGGAGTCTCTGAAGAT
CTCCTGTGAGGGTTCTGGATACAGGTTTACCAGCCACTGGATCGGCTGGGTGCGCCAGAT
GCCCGGGAAAGGCCTGGAGTGGATGGGGATCATCTATCCTGGTGACTCTGATACCAGAT
ACAGCCCGTCCTTCCAAGGCCAGGTCACCATCTCAGCCGACAAGTCCATCAGCACCGCCT
ACCTGCAGTGGAGCAGCCTGAAGGCCTCGGACACCGCCATGTATTACTGTGCGAGACAT
AGTGCGACGCATGATGCTTTTGATATCTGGGGCCGGGGCACCCTGGTCACCGTCTCGAGT (SEQ ID NO: 500)
V_{L} with CDR1, CDR2 and CDR3 underlined
QSVLTQPPSVSGAPGQRVTISCSGSSSNIGTGYDVHWYQQLPGTAPKLLIYSFNKRPSGVPDRF
SASKSGTSASLVITGLQAEDEADYYCQSYDNLSGPHVVFGTGTKLTVL (SEQ ID NO: 501)
CAGTCTGTGTTGACGCAGCCGCCCTCAGTGTCTGGGGCCCCAGGGCAGAGGGTCACCATC
TCCTGTAGTGGGAGCAGCTCCAACATCGGGACAGGTTACGATGTTCACTGGTACCAGCA
ACTTCCAGGAACAGCCCCCAAACTCCTCATCTATAGTTTCAATAAGCGGCCCTCAGGGGT
CCCTGACCGGTTCTCTGCCTCCAAGTCTGGCACCTCAGCCTCCCTGGTCATCACTGGGCTC
CAGGCTGAGGATGAGGCTGATTATTACTGCCAGTCCTATGACAATTTGAGTGGTCCCCAT
GTGGTTTTCGGCACAGGGACCAAGCTGACCGTCCTA (SEQ ID NO: 502)
Her2_S6R2_CS_1E5
V_{H} with CDR1, CDR2 and CDR3 underlined
EVQLVETGAEVKKPGASMKVSCKASGYSFTDYYMHWVRQAPGQGLEWMGWINPNSGDTN
YAQKFQGRVTMTRDTSITTAYMELSRLRSDDTAVYYCATERYNSGWEWGRGTLVTVSS (SEQ ID NO: 503)
GAGGTGCAGCTGGTGGAGACTGGGGCTGAGGTGAAGAAGCCTGGGGCCTCAATGAAGGT
CTCCTGCAAGGCTTCTGGATACAGCTTCACCGACTACTATATGCACTGGGTGCGACAGGC
CCCTGGACAAGGGCTTGAGTGGATGGGATGGATCAACCCTAATAGTGGTGACACAAACT
ATGCACAGAAGTTTCAGGGCAGGGTCACCATGACCAGGGACACGTCCATCACCACAGCC
TACATGGAGCTGAGCAGGCTGAGATCTGACGACACGGCCGTATATTACTGTGCGACAGA
GAGGTATAACAGTGGCTGGGAATGGGGCCGGGGCACCCTGGTCACCGTCTCGAGT (SEQ ID NO: 504)
V_{L} with CDR1, CDR2 and CDR3 underlined
QSALTQPASVSGSPGQSITISCTGTSSDVGAYNYVSWYQQHPGKAPKLMIYDVTTRPSGVSNR
FSGSKSGNTASLTISGLQAEDEADYYCTSYTRSSTVVFGGGTKLTVL (SEQ ID NO: 505)
CAGTCTGCCCTGACTCAGCCTGCCTCCGTGTCTGGGTCTCCTGGACAGTCGATCACCATCT
CCTGCACTGGAACCAGCAGTGACGTTGGTGCTTATAACTATGTCTCCTGGTACCAACAAC
ACCCAGGCAAAGCCCCCAAACTCATGATTTATGATGTCACTACTCGGCCCTCAGGGGTTT
CTAATCGCTTCTCTGGCTCCAAGTCTGGCAACACGGCCTCCCTGACCATCTCTGGGCTCC
AGGCTGAGGACGAGGCTGATTATTACTGCACCTCATATACTCGCAGCAGCACTGTGGTCT
TCGGCGGAGGGACCAAGCTGACCGTCCTA (SEQ ID NO: 506)
Her2_S6R3_BMV_1C2
V_{H} with CDR1, CDR2 and CDR3 underlined
KVQLVQSGSELKKPGASVKVSCQASGYTITNHSMNWVRQAPGQGLEWMGWINTNTGNPTY
AQGFTGRFVFSLDTSANTATLQITNVQAEDTAVYYCAREGSIDVSGTPYYYGMDAWGQGTT
VTVSS (SEQ ID NO: 507)
AAGGTGCAGCTGGTGCAGTCTGGGTCTGAGTTGAAGAAGCCTGGGGCCTCAGTGAAGGT
TTCCTGCCAGGCTTCTGGATACACCATCACTAACCATAGCATGAATTGGGTGCGACAGGC
CCCTGGGCAAGGGCTTGAGTGGATGGGATGGATCAACACCAACACTGGGAACCCTACGT
ATGCCCAGGGCTTCACAGGACGGTTTGTCTTCTCCTTGGACACCTCTGCCAACACGGCAA
CTTTGCAGATCACCAACGTGCAGGCTGAGGACACAGCCGTCTACTACTGTGCGAGAGAG
GGGAGTATAGACGTGTCTGGAACGCCCTACTACTACGGAATGGACGCCTGGGGGCAAGG
GACCACGGTCACCGTCTCCTCA (SEQ ID NO: 508)
V_{L} with CDR1, CDR2 and CDR3 underlined
QSVLTQPASVSGSPGQSITISCTGTSSDVGGYNYVSWYQQHPGKAPKLMIYEGSERPSGVPNR
FSGSKSGNTASLTISGLQAEDEADYYCSSYTTRSTRVFGGGTKLTIL (SEQ ID NO: 509)
CAGTCTGTGCTGACTCAGCCTGCCTCCGTGTCTGGGTCTCCTGGACAGTCGATCACCATCT
CCTGCACTGGAACCAGCAGTGACGTTGGTGGTTATAACTATGTCTCCTGGTACCAACAAC
ACCCAGGCAAAGCCCCCAAACTCATGATTTATGAGGGCAGTGAGCGGCCCTCAGGGGTT
CCTAATCGCTTCTCTGGCTCCAAGTCTGGCAACACGGCCTCCCTGACAATCTCTGGGCTC
CAGGCTGAGGACGAGGCTGATTATTACTGCAGCTCATATACAACCAGGAGCACTCGAGT
TTTCGGCGGAGGGACCAAGCTGACCATCCTA (SEQ ID NO: 510)
Her2_S5R2_DP47_1B10
V_{H} with CDR1, CDR2 and CDR3 underlined
EVQLLESGGGLVQPGGSLRLSCAASGFTFSSYAMSWVRQAPGKGLEWVSAISGSGGSTYYA
DSVKGRFTISRDNSKNTLYLQMNSLRAEDTAVYYCARVGAGENYYHYYIMDVWGRGTLVT
VSS (SEQ ID NO: 511)
GAGGTGCAGCTGTTGGAGTCTGGGGGAGGCTTGGTACAGCCTGGGGGGTCCCTGAGACT
CTCCTGTGCAGCCTCTGGATTCACCTTTAGCAGCTATGCCATGAGCTGGGTCCGCCAGGC
TCCAGGGAAGGGGCTGGAGTGGGTCTCAGCTATTAGTGGTAGTGGTGGTAGCACATACT
ACGCAGACTCCGTGAAGGGCCGGTTCACCATCTCCAGAGACAATTCCAAGAACACGCTG
TATCTGCAAATGAACAGCCTGAGAGCCGAGGACACGGCCGTGTATTACTGTGCGAGAGT
GGGGGCCGGGGAGAACTACTACCACTACTACATCATGGACGTCTGGGGCCGGGGCACCC
TGGTCACCGTCTCGAGT (SEQ ID NO: 512)
V_{L} with CDR1, CDR2 and CDR3 underlined
SSELTQDPAVSVALGQRVRVTCQGDSLRGYYASWYQQKPGQAPVLVIYGENNRPSGIPDRFS
GSSSGNTASLTIIGAQAEDEADYYCNSRHSSGNYLVFGGGTKLTVL (SEQ ID NO: 513)
TCTTCTGAGCTGACTCAGGACCCTGCTGTGTCTGTGGCCTTGGGACAGAGAGTCAGGGTC
ACATGCCAAGGAGACAGCCTCAGAGGCTATTATGCAAGCTGGTACCAGCAGAAGCCAGG
ACAGGCCCCTGTTCTTGTCATTTATGGTGAAAACAACCGGCCCTCAGGGATCCCAGACCG
ATTCTCTGGCTCCAGCTCAGGAAACACAGCTTCCTTGACCATCATTGGGGCTCAGGCGGA
AGATGAGGCTGACTATTACTGTAACTCCCGGCACAGCAGTGGTAATTATCTGGTGTTCGG
CGGAGGGACCAAGCTGACCGTCCTA (SEQ ID NO: 514)
Her2_S6R3_DP47_1C12
V_{H} with CDR1, CDR2 and CDR3 underlined
EVQLLESGGGLVQPGGSLRLSCAASGFTFSSYAMSWVRQAPGKGLEWVSAISGSGGSTYYA
DSVKGRFTISRDNSKNTLYLQMNSLRAEDTAVYYCARGFGDYWGRGTMVTVSS (SEQ ID NO: 515)
GAGGTGCAGCTGTTGGAGTCTGGGGGAGGCTTGGTACAGCCTGGGGGGTCCCTGAGACT
CTCCTGTGCAGCCTCTGGATTCACCTTTAGCAGCTATGCCATGAGCTGGGTCCGCCAGGC
TCCAGGGAAGGGGCTGGAGTGGGTCTCAGCTATTAGTGGTAGTGGTGGTAGCACATACT
ACGCAGACTCCGTGAAGGGCCGGTTCACCATCTCCAGAGACAATTCCAAGAACACGCTG
TATCTGCAAATGAACAGCCTGAGAGCCGAGGACACGGCCGTGTATTACTGTGCGAGAGG
CTTTGGTGACTACTGGGGCCGGGGGACAATGGTCACCGTCTCGAGT (SEQ ID NO: 516)
V_{L} with CDR1, CDR2 and CDR3 underlined
SSELTQDPAVSVALGQTVRITCQGDSLRSYYASWYQQKPGQAPVLVIYAKNNRPSGIPDRFS
GSDSGNTASLTITGAQAEDEADYYCLSRDSSGNHLVFGGGTKLTVL (SEQ ID NO: 517)
TCTTCTGAGCTGACTCAGGACCCTGCTGTGTCTGTGGCCTTGGGACAGACAGTCAGGATC
ACATGCCAAGGAGACAGCCTCAGAAGTTATTATGCAAGCTGGTACCAGCAGAAGCCAGG
ACAGGCCCCTGTACTTGTCATCTATGCTAAAAACAACCGACCCTCAGGGATCCCAGACCG
ATTCTCTGGCTCCGACTCAGGAAACACAGCTTCCTTGACCATCACTGGGGCTCAGGCGGA
AGATGAGGCTGACTATTACTGTCTCTCCCGGGACAGCAGTGGTAACCATCTGGTATTCGG
CGGAGGGACCAAGCTGACCGTCCTA (SEQ ID NO: 518)
Her2_S5R2_DP47_1D10
V_{H} with CDR1, CDR2 and CDR3 underlined
EVQLLESGGGLVQPGGSLRLSCAASGFTFSSYAMSWVRQAPGKGLEWVSAISGSGGSTYYA
DSVKGRFTISRDNSKNTLYLQMNSLRAEDTAVYYCARTTADAFDIWGRGTMVTVSS (SEQ ID NO: 519)
GAGGTGCAGCTGTTGGAGTCTGGGGGAGGCTTGGTACAGCCTGGGGGGTCCCTGAGACT
CTCCTGTGCAGCCTCTGGATTCACCTTTAGCAGCTATGCCATGAGCTGGGTCCGCCAGGC
TCCAGGGAAGGGGCTGGAGTGGGTCTCAGCTATTAGTGGTAGTGGTGGTAGCACATACT
ACGCAGACTCCGTGAAGGGCCGGTTCACCATCTCCAGAGACAATTCCAAGAACACGCTG
TATCTGCAAATGAACAGCCTGAGAGCCGAGGACACGGCCGTGTATTACTGTGCGAGAAC
TACGGCAGATGCTTTTGATATCTGGGGCAGAGGGACAATGGTCACCGTCTCGAGT (SEQ ID NO: 520)
V_{L} with CDR1, CDR2 and CDR3 underlined
SSELTQDPAVSVALGQTVKITCQGDSLRNYYAGWYQQKPGQAPVLVIYGENKRPSGIPDRFS
GSNSGNTASLTLTGAQAEDEADYYCNSRDSSSNLVVFGGGTKLTVL (SEQ ID NO: 521)
TCTTCTGAGCTGACTCAGGACCCTGCTGTGTCTGTGGCCTTGGGACAGACAGTCAAGATC
ACATGCCAAGGCGACAGCCTCAGAAACTATTATGCAGGCTGGTACCAGCAGAAGCCAGG
ACAGGCCCCTGTACTTGTCATCTATGGTGAAAACAAGCGGCCCTCAGGGATCCCTGACCG
ATTCTCTGGCTCCAACTCAGGAAACACAGCTTCCTTGACCCTCACTGGGGCTCAGGCGGA
AGATGAGGCTGACTATTACTGTAACTCCCGGGACAGCAGTAGTAACCTCGTGGTATTCGG
CGGAGGGACCAAGCTGACCGTCCTA (SEQ ID NO: 522)
Her2_S6R3_DP47_1H9
V_{H} with CDR1, CDR2 and CDR3 underlined
EVQLLESGGGLVQPGGSLRLSCAASGFTFSSYAMSWVRQAPGKGLEWVSAISGSGGSTYYA
DSVKGRFTISRDNSKNTLYLQMNSLRAEDTAVYYCARTTADAFDIWGRGTTVTVSS (SEQ ID NO: 523)
GAGGTGCAGCTGTTGGAGTCTGGGGGAGGCTTGGTACAGCCTGGGGGGTCCCTGAGACT
CTCCTGTGCAGCCTCTGGATTCACCTTTAGCAGCTATGCCATGAGCTGGGTCCGCCAGGC
TCCAGGGAAGGGGCTGGAGTGGGTCTCAGCTATTAGTGGTAGTGGTGGTAGCACATACT
ACGCAGACTCCGTGAAGGGCCGGTTCACCATCTCCAGAGACAATTCCAAGAACACGCTG
TATCTGCAAATGAACAGCCTGAGAGCCGAGGACACGGCCGTGTATTACTGTGCGAGAAC
TACGGCAGATGCTTTTGATATCTGGGGGAGGGGGACCACGGTCACCGTCTCGAGT (SEQ ID NO: 524)
V_{L} with CDR1, CDR2 and CDR3 underlined
SSELTQDPAVSVALGQTVSITCQGDSLRNFYASWYLQKPGQAPILVIYGKNKRPSGIPDRVSG
SSSEDTASLTITGAQAEDEADYYCNSRDSSGNVVFGGGTKLTVL (SEQ ID NO: 525)
CTTCTGAGCTGACTCAGGACCCTGCTGTGTCTGTGGCCCTGGGACAGACAGTCAGCATCA
CATGCCAGGGAGACAGCCTCAGAAACTTTTATGCAAGCTGGTACCTGCAGAAGCCAGGA
CAGGCCCCAATACTTGTCATCTATGGTAAAAACAAGCGGCCCTCTGGGATCCCAGACCG
AGTCTCTGGCTCCAGCTCAGAAGACACAGCTTCCTTGACCATCACTGGGGCTCAGGCGGA
AGATGAGGCTGACTATTACTGTAACTCCCGGGACAGCAGTGGTAACGTGGTCTTCGGCG
GGGGGACCAAGCTGACCGTCCTA (SEQ ID NO: 526)
>HerSMIP_leader_CDS
atggaagcaccagcgcagcttctcttcctcctgctactctggctcccagataccaccggt (SEQ ID NO: 527)
>HerSMIP_Protein_leader
MEAPAQLLFLLLLWLPDTTG (SEQ ID NO: 528)
>HerSMIP_G4Sx3_linker_CDS
ggaggcggcggttcaggcggaggtggctctggcggtggcggaagt (SEQ ID NO: 529)
>HerSMIP_Protein_G4Sx3_linker
GGGGSGGGGSGGGGS (SEQ ID NO: 530)
>HerSMIP_SCCP_Hinge_CDS
gagcccaaatcttctgacaaaactcacacatgcccaccgtgccca (SEQ ID NO: 531)
>HerSMIP_Protein_SCCP_Hinge
EPKSSDKTHTCPPCP (SEQ ID NO: 532)
>Her101_CDS
atggaagcaccagcgcagcttctcttcctcctgctactctggctcccagataccaccggtgaagtgcagctggtgcagtctggggctgaggtgagg
aagcctggggcctcagtgaaggtttcctgcaggtcatctggatacaccttcaccacctactatttgcactggctacgacaggcccctggacaagggc
ttgagtggatgggagtaattaaccctagcggcggtgccacagcctacgcgcagagtttccagggcagagtcaccatgaccagggacacggctac
gagcacagtctatttggatctgagcagcctgagaactgaagacacggccgtgtattactgtgcgagatccaccccggcggagcagctcgtcccgg
gcttctggggcaaagggacaatggtcaccgtctcgagtggaggcggcggttcaggcggaggtggctctggcggtggcggaagtgcacttgaaat
tgtgatgacgcagtctccagccaccctgtctgtgtctccaggggacagagccaccctctcctgcagggccagtcagagtgttagcaccaacgtagc
ctggtaccagcagaaacctggccaacctcccaggctcctcatctatggtgcatccaccagggcctctggtgtcccagccaggttcagtggcagtgg
gtctgggacagagttcactctcaccatcagcagtctgcagtctgaagattttgcagtttattactgtcaacagtatggtgactggcctccgatcaccttc
ggccaagggacacgactggagattaaacgtgacgtacgcgagcccaaatcttctgacaaaactcacacatgcccaccgtgcccagcacctgaact
cctgggtggaccgtcagtcttcctcttccccccaaaacccaaggacaccctcatgatctcccggacccctgaggtcacatgcgtggtggtggacgt
gagccacgaagaccctgaggtcaagttcaactggtacgtggacggcgtggaggtgcataatgccaagacaaagccgcgggaggagcagtaca
acagcacgtaccgtgtggtcagcgtcctcaccgtcctgcaccaggactggctgaatggcaaggagtacaagtgcaaggtctccaacaaagccctc
ccagcccccatcgagaaaaccatctccaaagccaaagggcagccccgagaaccacaggtgtacaccctgcccccatcccgggatgagctgacc
aagaaccaggtcagcctgacctgcctggtcaaaggcttctatccaagcgacatcgccgtggagtgggagagcaatgggcagccggagaacaact
acaagaccacgcctcccgtgctggactccgacggctccttcttcctctacagcaagctcaccgtggacaagagcaggtggcagcaggggaacgt
cttctcatgctccgtgatgcatgaggctctgcacaaccactacacgcagaagagcctctccctgtctccgggtaaatga (SEQ ID NO: 533)
>Her101_Protein_leader-stop
MEAPAQLLFLLLLWLPDTTGEVQLVQSGAEVRKPGASVKVSCRSSGYTFTTYYLHWLRQAP
GQGLEWMGVINPSGGATAYAQSFQGRVTMTRDTATSTVYLDLSSLRTEDTAVYYCARSTPA
EQLVPGFWGKGTMVTVSSGGGGSGGGGSGGGGSALEIVMTQSPATLSVSPGDRATLSCRAS
QSVSTNVAWYQQKPGQPPRLLIYGASTRASGVPARFSGSGSGTEFTLTISSLQSEDFAVYYCQ
QYGDWPPITFGQGTRLEIKRDVREPKSSDKTHTCPPCPAPELLGGPSVFLFPPKPKDTLMISRT
PEVTCVVVDVSHEDPEVKFNWYVDGVEVHNAKTKPREEQYNSTYRVVSVLTVLHQDWLNG
KEYKCKVSNKALPAPIEKTISKAKGQPREPQVYTLPPSRDELTKNQVSLTCLVKGFYPSDIAV
EWESNGQPENNYKTTPPVLDSDGSFFLYSKLTVDKSRWQQGNVFSCSVMHEALHNHYTQKS
LSLSPGK. (SEQ ID NO: 534)
>Her102_CDS
atggaagcaccagcgcagcttctcttcctcctgctactctggctcccagataccaccggtcagatgcagctggtgcagtctggggctgaggtgaag
aagccaggggcctcagtgaaagtctcctgcaagtcttctggatacaccttcaaggactactatatcaactgggtgcgacaggcccctggacaaggg
cttgagtgggtgggatggatcaaccctaaaaatggtatcacaaaatattcgcagaattttcagggcagggtctccatgaccacggatacgtccatca
gcacagtctacatggacctgagaggtctgacatctgacgacacggccgtttattattgtgcgagagacgcgaaccgccttagggtgggctggttcg
acccctggggccaaggaaccctggtcaccgtctcgagtggaggcggcggttcaggcggaggtggctctggcggtggcggaagtgcacaggct
gtgctgactcagccgtcctcagtgtctgggtccccagggcagagggtcagcatctcctgcactgggagcagctccaacatcggggcaggttatgat
gtacattggtatcaacaacttccaggaacagcccccaaactcctcatctacggtaacatcaatcggccctcaggggtccctgaccgattctctggctc
caagtctggcacctcagcctccctggccatcactgggctccaggctgaagatgaggctgattattactgccagtcctatgacagcagcctgagggct
gcggtattcggcggagggaccaaggtcaccgtcctaggtgacgtacgcgagcccaaatcttctgacaaaactcacacatgcccaccgtgcccag
cacctgaactcctgggtggaccgtcagtcttcctcttccccccaaaacccaaggacaccctcatgatctcccggacccctgaggtcacatgcgtggt
ggtggacgtgagccacgaagaccctgaggtcaagttcaactggtacgtggacggcgtggaggtgcataatgccaagacaaagccgcgggagg
agcagtacaacagcacgtaccgtgtggtcagcgtcctcaccgtcctgcaccaggactggctgaatggcaaggagtacaagtgcaaggtctccaac
aaagccctcccagcccccatcgagaaaaccatctccaaagccaaagggcagccccgagaaccacaggtgtacaccctgcccccatcccgggat
gagctgaccaagaaccaggtcagcctgacctgcctggtcaaaggcttctatccaagcgacatcgccgtggagtgggagagcaatgggcagccg
gagaacaactacaagaccacgcctcccgtgctggactccgacggctccttcttcctctacagcaagctcaccgtggacaagagcaggtggcagcagggg
aacgtcttctcatgctccgtgatgcatgaggctctgcacaaccactacacgcagaagagcctctccctgtctccgggtaaatga (SEQ ID NO: 535)
>Her102_Protein_leader-stop
MEAPAQLLFLLLLWLPDTTGQMQLVQSGAEVKKPGASVKVSCKSSGYTFKDYYINWVRQA
PGQGLEWVGWINPKNGITKYSQNFQGRVSMTTDTSISTVYMDLRGLTSDDTAVYYCARDAN
RLRVGWFDPWGQGTLVTVSSGGGGSGGGGSGGGGSAQAVLTQPSSVSGSPGQRVSISCTGSS
SNIGAGYDVHWYQQLPGTAPKLLIYGNINRPSGVPDRFSGSKSGTSASLAITGLQAEDEADYY
CQSYDSSLRAAVFGGGTKVTVLGDVREPKSSDKTHTCPPCPAPELLGGPSVFLFPPKPKDTLM
ISRTPEVTCVVVDVSHEDPEVKFNWYVDGVEVHNAKTKPREEQYNSTYRVVSVLTVLHQD
WLNGKEYKCKVSNKALPAPIEKTISKAKGQPREPQVYTLPPSRDELTKNQVSLTCLVKGFYPS
DIAVEWESNGQPENNYKTTPPVLDSDGSFFLYSKLTVDKSRWQQGNVFSCSVMHEALHNHY
TQKSLSLSPGK. (SEQ ID NO: 536)
>Her103_CDS
atggaagcaccagcgcagcttctcttcctcctgctactctggctcccagataccaccggtgaggtgcagctgttggagtctgggggaggcttggtac
agcctggggggtccctgagactctcctgtgcagcctctggattcacctttagcagctatgccatgagctgggtccgccaggctccagggaagggg
ctggagtgggtctcagctattagtggtagtggtggtagcacatactacgcagactccgtgaagggccggttcaccatctccagagacaattccaaga
acacgctgtatctgcaaatgaacagcctgagagccgaggacacggccgtgtattactgtgcgcagggtactcatagcagtggctggtcctttgggt
actggggccagggcaccctggtcaccgtctcgagtggaggcggcggttcaggcggaggtggctctggcggtggcggaagtgcactgcctgtgc
tgactcagcccccctcagcgtctgggacccccgggcagagggtcaccatctcttgttctggaagcagctccaacatcggaagtaaaactgtaaact
ggtaccagcagctcccaggaacgacccccaaactcctcatctataggaataatcagcggccctcaggggtccctgaccgattctctggctccaagt
ctggcacctcagcctccctggccatcagtgggctccagtctgaggatgaggctgattattattgtgcagcatgggatgacagcctgaatggtctgata
ttcggcggagggaccaaggtcaccgtcctaggtgacgtacgcgagcccaaatcttctgacaaaactcacacatgcccaccgtgcccagcacctga
actcctgggtggaccgtcagtcttcctcttccccccaaaacccaaggacaccctcatgatctcccggacccctgaggtcacatgcgtggtggtggac
gtgagccacgaagaccctgaggtcaagttcaactggtacgtggacggcgtggaggtgcataatgccaagacaaagccgcgggaggagcagtac
aacagcacgtaccgtgtggtcagcgtcctcaccgtcctgcaccaggactggctgaatggcaaggagtacaagtgcaaggtctccaacaaagccct
cccagcccccatcgagaaaaccatctccaaagccaaagggcagccccgagaaccacaggtgtacaccctgcccccatcccgggatgagctgac
caagaaccaggtcagcctgacctgcctggtcaaaggcttctatccaagcgacatcgccgtggagtgggagagcaatgggcagccggagaacaa
ctacaagaccacgcctcccgtgctggactccgacggctccttcttcctctacagcaagctcaccgtggacaagagcaggtggcagcaggggaac
gtcttctcatgctccgtgatgcatgaggctctgcacaaccactacacgcagaagagcctctccctgtctccgggtaaatga (SEQ ID NO: 537)
>Her103_Protein_leader-stop
MEAPAQLLFLLLLWLPDTTGEVQLLESGGGLVQPGGSLRLSCAASGFTFSSYAMSWVRQAP
GKGLEWVSAISGSGGSTYYADSVKGRFTISRDNSKNTLYLQMNSLRAEDTAVYYCAQGTHS
SGWSFGYWGQGTLVTVSSGGGGSGGGGSGGGGSALPVLTQPPSASGTPGQRVTISCSGSSSNI
GSKTVNWYQQLPGTTPKLLIYRNNQRPSGVPDRFSGSKSGTSASLAISGLQSEDEADYYCAA
WDDSLNGLIFGGGTKVTVLGDVREPKSSDKTHTCPPCPAPELLGGPSVFLFPPKPKDTLMISR
TPEVTCVVVDVSHEDPEVKFNWYVDGVEVHNAKTKPREEQYNSTYRVVSVLTVLHQDWLN
GKEYKCKVSNKALPAPIEKTISKAKGQPREPQVYTLPPSRDELTKNQVSLTCLVKGFYPSDIA
VEWESNGQPENNYKTTPPVLDSDGSFFLYSKLTVDKSRWQQGNVFSCSVMHEALHNHYTQ
KSLSLSPGK. (SEQ ID NO: 538)
>Her104_CDS
atggaagcaccagcgcagcttctcttcctcctgctactctggctcccagataccaccggtcaggtacagctgcagcagtcaggggctgaggtgaag
aagcctggggcctcagtgaaggtctcctgcaaggtttccggatacaccccccctgatttatccatccactgggtgcgacaggctcctggagaaggg
cttgagtggatgggacgttttgattttgaagatggtgaaacaatcaacgcacagaagttccagggcagagtcaccatgaccgcggacacatccaca
aacacaggctacatggaggtgagcagcctgagatttgaggacacggccgtgtattactgtgcaacaacacttcgattttctggttactactacggtat
ggacttctggggccgaggaaccctggtcaccgtctcgagtggaggcggcggttcaggcggaggtggctctggcggtggcggaagtgcacagg
ctgtggtgatccaggagccatcgctctcagtgtcccctggagggacagtcacactcacttgtgccttgagctctggctcagtctccactggttactacc
ccagctggtaccagcagaccccaggccaggctccacgcacgctcatttacaacacagacactcgctcttctggggtccctggtcgcttctctggctc
catccttggggacaaagctgccctcaccatcacgggggcccaggcagatgatgaatctgattattactgtgtgctgtatatgggtagtggcatttggg
tgttcggcggagggaccaaggtcaccgtcctaggtgacgtacgcgagcccaaatcttctgacaaaactcacacatgcccaccgtgcccagcacct
gaactcctgggtggaccgtcagtcttcctcttccccccaaaacccaaggacaccctcatgatctcccggacccctgaggtcacatgcgtggtggtg
gacgtgagccacgaagaccctgaggtcaagttcaactggtacgtggacggcgtggaggtgcataatgccaagacaaagccgcgggaggagca
gtacaacagcacgtaccgtgtggtcagcgtcctcaccgtcctgcaccaggactggctgaatggcaaggagtacaagtgcaaggtctccaacaaag
ccctcccagcccccatcgagaaaaccatctccaaagccaaagggcagccccgagaaccacaggtgtacaccctgcccccatcccgggatgagc
tgaccaagaaccaggtcagcctgacctgcctggtcaaaggcttctatccaagcgacatcgccgtggagtgggagagcaatgggcagccggaga
acaactacaagaccacgcctcccgtgctggactccgacggctccttcttcctctacagcaagctcaccgtggacaagagcaggtggcagcaggg
gaacgtcttctcatgctccgtgatgcatgaggctctgcacaaccactacacgcagaagagcctctccctgtctccgggtaaatga (SEQ ID NO: 539)
>Her104_Protein_leader-stop
MEAPAQLLFLLLLWLPDTTGQVQLQQSGAEVKKPGASVKVSCKVSGYTPPDLSIHWVRQAP
GEGLEWMGRFDFEDGETINAQKFQGRVTMTADTSTNTGYMEVSSLRFEDTAVYYCATTLRF
SGYYYGMDFWGRGTLVTVSSGGGGSGGGGSGGGGSAQAVVIQEPSLSVSPGGTVTLTCALS
SGSVSTGYYPSWYQQTPGQAPRTLIYNTDTRSSGVPGRFSGSILGDKAALTITGAQADDESDY
YCVLYMGSGIWVFGGGTKVTVLGDVREPKSSDKTHTCPPCPAPELLGGPSVFLFPPKPKDTL
MISRTPEVTCVVVDVSHEDPEVKFNWYVDGVEVHNAKTKPREEQYNSTYRVVSVLTVLHQ
DWLNGKEYKCKVSNKALPAPIEKTISKAKGQPREPQVYTLPPSRDELTKNQVSLTCLVKGFY
PSDIAVEWESNGQPENNYKTTPPVLDSDGSFFLYSKLTVDKSRWQQGNVFSCSVMHEALHN
HYTQKSLSLSPGK. (SEQ ID NO: 540)
>Her105_CDS
atggaagcaccagcgcagcttctcttcctcctgctactctggctcccagataccaccggtcaggtccagctggtacagtctggagcagaggttaaaa
agcccggggagtctctgaagatctcctgtaagacttctggatacagctttaccagctattggatcggctgggtgcgccagatgcccgggaaaggcc
tggagtggatggggatcatctatcctggtgactctgataccagatacagcccgtcttttcaaggccaggtcaccatctcagccgacaagtccatcagc
accgcctacctgcagtggagcagcctgaaggcctcggacaccgccatgtattactgtgcgagacatgacctcccccatcaggagtatcaggacaa
cggtatggacgtctggggcaaaggaaccctggtcaccgtctcgagtggaggcggcggttcaggcggaggtggctctggcggtggcggaagtgc
acagactgtggtgatccaggagccatcgttctcagtgtcccctggagagacagtcacactcacttgtgccttgagctctggctcagtctctagtagtta
ctaccccagctggtaccagcagaccccaggccaggctccacgcgcgctcatctacaacacaaacactcgctcttctggggtccctgatcgcttctct
ggctccatccttgggaacaaagctgccctcaccatcacgggggcccaggcagatgatgaatctaactattactgtgcgctgtatctgggtagtggca
tttgggtgttcggcggagggaccaagctgaccgtcctaggtgacgtacgcgagcccaaatcttctgacaaaactcacacatgcccaccgtgccca
gcacctgaactcctgggtggaccgtcagtcttcctcttccccccaaaacccaaggacaccctcatgatctcccggacccctgaggtcacatgcgtg
gtggtggacgtgagccacgaagaccctgaggtcaagttcaactggtacgtggacggcgtggaggtgcataatgccaagacaaagccgcgggag
gagcagtacaacagcacgtaccgtgtggtcagcgtcctcaccgtcctgcaccaggactggctgaatggcaaggagtacaagtgcaaggtctccaa
caaagccctcccagcccccatcgagaaaaccatctccaaagccaaagggcagccccgagaaccacaggtgtacaccctgcccccatcccggga
tgagctgaccaagaaccaggtcagcctgacctgcctggtcaaaggcttctatccaagcgacatcgccgtggagtgggagagcaatgggcagccg
gagaacaactacaagaccacgcctcccgtgctggactccgacggctccttcttcctctacagcaagctcaccgtggacaagagcaggtggcagcagggg
aacgtcttctcatgctccgtgatgcatgaggctctgcacaaccactacacgcagaagagcctctccctgtctccgggtaaatga (SEQ ID NO: 541)
>Her105_Protein_leader-stop
MEAPAQLLFLLLLWLPDTTGQVQLVQSGAEVKKPGESLKISCKTSGYSFTSYWIGWVRQMP
GKGLEWMGIIYPGDSDTRYSPSFQGQVTISADKSISTAYLQWSSLKASDTAMYYCARHDLPH
QEYQDNGMDVWGKGTLVTVSSGGGGSGGGGSGGGGSAQTVVIQEPSFSVSPGETVTLTCAL
SSGSVSSSYYPSWYQQTPGQAPRALIYNTNTRSSGVPDRFSGSILGNKAALTITGAQADDESN
YYCALYLGSGIWVFGGGTKLTVLGDVREPKSSDKTHTCPPCPAPELLGGPSVFLFPPKPKDTL
MISRTPEVTCVVVDVSHEDPEVKFNWYVDGVEVHNAKTKPREEQYNSTYRVVSVLTVLHQ
DWLNGKEYKCKVSNKALPAPIEKTISKAKGQPREPQVYTLPPSRDELTKNQVSLTCLVKGFY
PSDIAVEWESNGQPENNYKTTPPVLDSDGSFFLYSKLTVDKSRWQQGNVFSCSVMHEALHN
HYTQKSLSLSPGK. (SEQ ID NO: 542)
>Her106_CDS
atggaagcaccagcgcagcttctcttcctcctgctactctggctcccagataccaccggtgaggtgcagctggtgcagtctggagcagaggtgaag
aagcccggggagtctctgaagatctcctgtcagggttctggatacacctttgccagccaatggatcgcctgggtgcgccagatgcccgggcaagg
cctggagtggatggggaccatctggcctggtgactctaatcccacatatagcccgtccttccaaggccaggtcaccatctcagccgacaagtccatc
agcaccgcctacctgcagtggagcagcctgaaggcctcggacaccgccatctattactgtgcgaggctctacaataactatccctacttctacggtat
ggacgtctggggccaggggacaatggtcaccgtctcgagtggaggcggcggttcaggcggaggtggctctggcggtggcggaagtgcacaga
ctgtggtgctccaggagccatcgttctcagtgtcccctggagggacagtcacactcacttgtggcttgaggtctggctcagtctctactacttactacc
ccagctggtaccagcagaccccaggccaggctccacgcacgctcatctacagcacaaacactcgctcttctggggtccctgatcgcttctctggct
ccatcgtcgggaacaaagctgccctcaccatcacgggggcccaggcagatgatgaatctgattattactgtgcgctatacctgggtagtggcacttg
ggtgttcggcggagggaccaagctgaccgtcctaggtgacgtacgcgagcccaaatcttctgacaaaactcacacatgcccaccgtgcccagca
cctgaactcctgggtggaccgtcagtcttcctcttccccccaaaacccaaggacaccctcatgatctcccggacccctgaggtcacatgcgtggtgg
tggacgtgagccacgaagaccctgaggtcaagttcaactggtacgtggacggcgtggaggtgcataatgccaagacaaagccgcgggaggagc
agtacaacagcacgtaccgtgtggtcagcgtcctcaccgtcctgcaccaggactggctgaatggcaaggagtacaagtgcaaggtctccaacaaa
gccctcccagcccccatcgagaaaaccatctccaaagccaaagggcagccccgagaaccacaggtgtacaccctgcccccatcccgggatgag
ctgaccaagaaccaggtcagcctgacctgcctggtcaaaggcttctatccaagcgacatcgccgtggagtgggagagcaatgggcagccggag
aacaactacaagaccacgcctcccgtgctggactccgacggctccttcttcctctacagcaagctcaccgtggacaagagcaggtggcagcaggg
gaacgtcttctcatgctccgtgatgcatgaggctctgcacaaccactacacgcagaagagcctctccctgtctccgggtaaatga (SEQ ID NO: 543)
>Her106_Protein_leader-stop
MEAPAQLLFLLLLWLPDTTGEVQLVQSGAEVKKPGESLKISCQGSGYTFASQWIAWVRQMP
GQGLEWMGTIWPGDSNPTYSPSFQGQVTISADKSISTAYLQWSSLKASDTAIYYCARLYNNY
PYFYGMDVWGQGTMVTVSSGGGGSGGGGSGGGGSAQTVVLQEPSFSVSPGGTVTLTCGLR
SGSVSTTYYPSWYQQTPGQAPRTLIYSTNTRSSGVPDRFSGSIVGNKAALTITGAQADDESDY
YCALYLGSGTWVFGGGTKLTVLGDVREPKSSDKTHTCPPCPAPELLGGPSVFLFPPKPKDTL
MISRTPEVTCVVVDVSHEDPEVKFNWYVDGVEVHNAKTKPREEQYNSTYRVVSVLTVLHQ
DWLNGKEYKCKVSNKALPAPIEKTISKAKGQPREPQVYTLPPSRDELTKNQVSLTCLVKGFY
PSDIAVEWESNGQPENNYKTTPPVLDSDGSFFLYSKLTVDKSRWQQGNVFSCSVMHEALHN
HYTQKSLSLSPGK. (SEQ ID NO: 544)
>Her107_CDS
atggaagcaccagcgcagcttctcttcctcctgctactctggctcccagataccaccggtcagatgcagctggtgcagtctggggctgaggtgaag
aagcctggggcctcagtgaaggtttcctgcaaggcatctggatacaccttcaccagctactatatacactgggtgcgacaggcccctggacagggc
cctgagtggatgggaataatcctccctagtggtggcagcaccagctacgcacaggagttccagggcagactctccatgaccagggacacgtccac
gagcacagtgtacatggagctgagcgacctgagatctgacgacacggccatttattattgtgcgagagactatgataggagtgcttatcttgatatctg
gggccgagggacaatggtcaccgtctcgagtggaggcggcggttcaggcggaggtggctctggcggtggcggaagtgcacagtctgtgttgac
gcagccgccctcagcgtctgggacccccgggcagagggtcaccatctcttgttctggaagcagctccaacatcggaagaaatactgtaaactggt
acaagcagttcccaggaacggcccccaaactcctcatctatagtgataataagcggccctcagggatccctgaccgattctctggctccaagtctgg
cacctcagcctccctggccatcagtgggctccagtctggggatgaggctgattattactgtgccgcatgggatgacagcctgaatggccatgtggta
ttcggcggagggaccaagctgaccgtcctaggtgacgtacgcgagcccaaatcttctgacaaaactcacacatgcccaccgtgcccagcacctga
actcctgggtggaccgtcagtcttcctcttccccccaaaacccaaggacaccctcatgatctcccggacccctgaggtcacatgcgtggtggtggac
gtgagccacgaagaccctgaggtcaagttcaactggtacgtggacggcgtggaggtgcataatgccaagacaaagccgcgggaggagcagtac
aacagcacgtaccgtgtggtcagcgtcctcaccgtcctgcaccaggactggctgaatggcaaggagtacaagtgcaaggtctccaacaaagccct
cccagcccccatcgagaaaaccatctccaaagccaaagggcagccccgagaaccacaggtgtacaccctgcccccatcccgggatgagctgac
caagaaccaggtcagcctgacctgcctggtcaaaggcttctatccaagcgacatcgccgtggagtgggagagcaatgggcagccggagaacaa
ctacaagaccacgcctcccgtgctggactccgacggctccttcttcctctacagcaagctcaccgtggacaagagcaggtggcagcaggggaac
gtcttctcatgctccgtgatgcatgaggctctgcacaaccactacacgcagaagagcctctccctgtctccgggtaaatga (SEQ ID NO: 545)
>Her107_Protein_leader-stop
MEAPAQLLFLLLLWLPDTTGQMQLVQSGAEVKKPGASVKVSCKASGYTFTSYYIHWVRQAP
GQGPEWMGIILPSGGSTSYAQEFQGRLSMTRDTSTSTVYMELSDLRSDDTAIYYCARDYDRS
AYLDIWGRGTMVTVSSGGGGSGGGGSGGGGSAQSVLTQPPSASGTPGQRVTISCSGSSSNIG
RNTVNWYKQFPGTAPKLLIYSDNKRPSGIPDRFSGSKSGTSASLAISGLQSGDEADYYCAAW
DDSLNGHVVFGGGTKLTVLGDVREPKSSDKTHTCPPCPAPELLGGPSVFLFPPKPKDTLMISR
TPEVTCVVVDVSHEDPEVKFNWYVDGVEVHNAKTKPREEQYNSTYRVVSVLTVLHQDWLN
GKEYKCKVSNKALPAPIEKTISKAKGQPREPQVYTLPPSRDELTKNQVSLTCLVKGFYPSDIA
VEWESNGQPENNYKTTPPVLDSDGSFFLYSKLTVDKSRWQQGNVFSCSVMHEALHNHYTQ
KSLSLSPGK. (SEQ ID NO: 546)
>Her108_CDS
atggaagcaccagcgcagcttctcttcctcctgctactctggctcccagataccaccggtgaagtgcagctggtgcagtctggggctgaggtgaag
aagcctggggcctcagtgagggtctcctgcaagggttctggaaacaccttcaccggccactacatccactgggtgcgacaggcccctggacaag
gacttgagtggctgggatggatcgaccctaacactggtgacatacagtattcagaaaactttaagggctcggtcaccttgaccagggacccatccat
caactcagtcttcatggacctgatcaggctgacatctgacgacacggccatgtattactgtgcgagagaaggtgccgggctcgccaactactattact
acggtctggacgtctggggccgagggacaatggtcaccgtctcgagtggaggcggcggttcaggcggaggtggctctggcggtggcggaagt
gcacagactgtggtgctccaggagccttcgttctcagtgtcccctggggggacagtcacactcacttgtggcttgaactttggctcagtctctactgct
tactaccccagttggtaccagcagaccccaggccaagctccacgcacgctcatctacggcacaaatattcgttcctctggggtcccggatcgcttct
ctggctccatcgtagggaacaaagctgccctcaccatcacgggggcccagacagaagatgagtctgattattattgtgcgctgtatatgggtagtgg
catgctcttcggcggcgggaccaaggtcaccgtcctaggtgacgtacgcgagcccaaatcttctgacaaaactcacacatgcccaccgtgcccag
cacctgaactcctgggtggaccgtcagtcttcctcttccccccaaaacccaaggacaccctcatgatctcccggacccctgaggtcacatgcgtggt
ggtggacgtgagccacgaagaccctgaggtcaagttcaactggtacgtggacggcgtggaggtgcataatgccaagacaaagccgcgggagg
agcagtacaacagcacgtaccgtgtggtcagcgtcctcaccgtcctgcaccaggactggctgaatggcaaggagtacaagtgcaaggtctccaac
aaagccctcccagcccccatcgagaaaaccatctccaaagccaaagggcagccccgagaaccacaggtgtacaccctgcccccatcccgggat
gagctgaccaagaaccaggtcagcctgacctgcctggtcaaaggcttctatccaagcgacatcgccgtggagtgggagagcaatgggcagccg
gagaacaactacaagaccacgcctcccgtgctggactccgacggctccttcttcctctacagcaagctcaccgtggacaagagcaggtggcagcagggg
aacgtcttctcatgctccgtgatgcatgaggctctgcacaaccactacacgcagaagagcctctccctgtctccgggtaaatga (SEQ ID NO: 547)
>Her108_Protein_leader-stop
MEAPAQLLFLLLLWLPDTTGEVQLVQSGAEVKKPGASVRVSCKGSGNTFTGHYIHWVRQAP
GQGLEWLGWIDPNTGDIQYSENFKGSVTLTRDPSINSVFMDLIRLTSDDTAMYYCAREGAGL
ANYYYYGLDVWGRGTMVTVSSGGGGSGGGGSGGGGSAQTVVLQEPSFSVSPGGTVTLTCG
LNFGSVSTAYYPSWYQQTPGQAPRTLIYGTNIRSSGVPDRFSGSIVGNKAALTITGAQTEDES
DYYCALYMGSGMLFGGGTKVTVLGDVREPKSSDKTHTCPPCPAPELLGGPSVFLFPPKPKDT
LMISRTPEVTCVVVDVSHEDPEVKFNWYVDGVEVHNAKTKPREEQYNSTYRVVSVLTVLHQ
DWLNGKEYKCKVSNKALPAPIEKTISKAKGQPREPQVYTLPPSRDELTKNQVSLTCLVKGFY
PSDIAVEWESNGQPENNYKTTPPVLDSDGSFFLYSKLTVDKSRWQQGNVFSCSVMHEALHN
HYTQKSLSLSPGK. (SEQ ID NO: 548)
>Her109_CDS
atggaagcaccagcgcagcttctcttcctcctgctactctggctcccagataccaccggtgaggtgcagctgttggagtctgggggaggcttggtac
agcctggggggtccctgagactctcctgtgcagcctctggattcacctttagcagctatgccatgagctgggtccgccaggctccagggaagggg
ctggagtgggtctcagctattagtggtagtggtggtagcacatactacgcagactccgtgaagggccggttcaccatctccagagacaattccaaga
acacgctgtatctgcaaatgaacagcctgagagccgaggacacggccgtgtattactgtgccagagatttaactggcccaaaccactggttcttcga
tctctgggggcgggggaccacggtcaccgtctcgagtggaggcggcggttcaggcggaggtggctctggcggtggcggaagtgcacagtctgt
gctgactcagccaccctccgtgtccgtgtccccaggacagacagccagcatctcctgctctggacatagattgggcgataagtatgttagttggtatc
ggcagaggccgggccagtcccctgtgctggtcatctatcaagatgagaagaggtactcagggatctctgagcgattctctggctccaactctggga
acgtagccactctgaccatcaccgggacccaggctatggatgaggctgactatcactgtcaggcgtgggacagcaccactgtggtgttcggcgga
gggaccaagctgaccgtcctaggtgacgtacgcgagcccaaatcttctgacaaaactcacacatgcccaccgtgcccagcacctgaactcctggg
tggaccgtcagtcttcctcttccccccaaaacccaaggacaccctcatgatctcccggacccctgaggtcacatgcgtggtggtggacgtgagcca
cgaagaccctgaggtcaagttcaactggtacgtggacggcgtggaggtgcataatgccaagacaaagccgcgggaggagcagtacaacagcac
gtaccgtgtggtcagcgtcctcaccgtcctgcaccaggactggctgaatggcaaggagtacaagtgcaaggtctccaacaaagccctcccagccc
ccatcgagaaaaccatctccaaagccaaagggcagccccgagaaccacaggtgtacaccctgcccccatcccgggatgagctgaccaagaacc
aggtcagcctgacctgcctggtcaaaggcttctatccaagcgacatcgccgtggagtgggagagcaatgggcagccggagaacaactacaagac
cacgcctcccgtgctggactccgacggctccttcttcctctacagcaagctcaccgtggacaagagcaggtggcagcaggggaacgtcttctcatg
ctccgtgatgcatgaggctctgcacaaccactacacgcagaagagcctctccctgtctccgggtaaatga (SEQ ID NO: 549)
>Her109_Protein_leader-stop
MEAPAQLLFLLLLWLPDTTGEVQLLESGGGLVQPGGSLRLSCAASGFTFSSYAMSWVRQAP
GKGLEWVSAISGSGGSTYYADSVKGRFTISRDNSKNTLYLQMNSLRAEDTAVYYCARDLTG
PNHWFFDLWGRGTTVTVSSGGGGSGGGGSGGGGSAQSVLTQPPSVSVSPGQTASISCSGHRL
GDKYVSWYRQRPGQSPVLVIYQDEKRYSGISERFSGSNSGNVATLTITGTQAMDEADYHCQ
AWDSTTVVFGGGTKLTVLGDVREPKSSDKTHTCPPCPAPELLGGPSVFLFPPKPKDTLMISRT
PEVTCVVVDVSHEDPEVKFNWYVDGVEVHNAKTKPREEQYNSTYRVVSVLTVLHQDWLNG
KEYKCKVSNKALPAPIEKTISKAKGQPREPQVYTLPPSRDELTKNQVSLTCLVKGFYPSDIAV
EWESNGQPENNYKTTPPVLDSDGSFFLYSKLTVDKSRWQQGNVFSCSVMHEALHNHYTQKS
LSLSPGK. (SEQ ID NO: 550)
>Her110_CDS
atggaagcaccagcgcagcttctcttcctcctgctactctggctcccagataccaccggtgaggtgcagctgttggagtctgggggaggcttggtac
agcctggggggtccctgagactctcctgtgcagcctctggattcacctttagcagctatgccatgagctgggtccgccaggctccagggaagggg
ctggagtgggtctcagctattagtggtagtggtggtagcacatactacgcagactccgtgaagggccggttcaccatctccagagacaattccaaga
acacgctgtatctgcaaatgaacagcctgagagccgaggacacggccgtgtattactgtgcgagaggcagtagagtggggacgatttggggaag
ccttgacgactggggcaaagggacaatggtcaccgtctcgagtggaggcggcggttcaggcggaggtggctctggcggtggcggaagtgcact
tgaaacgacactcacgcagtctccaggcaccctgtctttgtctccaggggaaagagccaccctctcctgcagggccagtcagagtagtagcagca
gctacttagcctggtaccagcagaaacctggccaggctcccaggctcctcatctatgctgcatccagcagggccactggcgtcccagacaggttca
gtggcagtgggtctgggacagacttcactctcaccatcagcagactggagcctgaagattttgcagtgtattactgtcagcagtatggtagctcacgg
ttcaccttcggccaagggacacgactggagattaaacgtgacgtacgcgagcccaaatcttctgacaaaactcacacatgcccaccgtgcccagc
acctgaactcctgggtggaccgtcagtcttcctcttccccccaaaacccaaggacaccctcatgatctcccggacccctgaggtcacatgcgtggtg
gtggacgtgagccacgaagaccctgaggtcaagttcaactggtacgtggacggcgtggaggtgcataatgccaagacaaagccgcgggagga
gcagtacaacagcacgtaccgtgtggtcagcgtcctcaccgtcctgcaccaggactggctgaatggcaaggagtacaagtgcaaggtctccaaca
aagccctcccagcccccatcgagaaaaccatctccaaagccaaagggcagccccgagaaccacaggtgtacaccctgcccccatcccgggatg
agctgaccaagaaccaggtcagcctgacctgcctggtcaaaggcttctatccaagcgacatcgccgtggagtgggagagcaatgggcagccgg
agaacaactacaagaccacgcctcccgtgctggactccgacggctccttcttcctctacagcaagctcaccgtggacaagagcaggtggcagcagggg
aacgtcttctcatgctccgtgatgcatgaggctctgcacaaccactacacgcagaagagcctctccctgtctccgggtaaatga (SEQ ID NO: 551)
>Her110_Protein_leader-stop
MEAPAQLLFLLLLWLPDTTGEVQLLESGGGLVQPGGSLRLSCAASGFTFSSYAMSWVRQAP
GKGLEWVSAISGSGGSTYYADSVKGRFTISRDNSKNTLYLQMNSLRAEDTAVYYCARGSRV
GTIWGSLDDWGKGTMVTVSSGGGGSGGGGSGGGGSALETTLTQSPGTLSLSPGERATLSCR
ASQSSSSSYLAWYQQKPGQAPRLLIYAASSRATGVPDRFSGSGSGTDFTLTISRLEPEDFAVY
YCQQYGSSRFTFGQGTRLEIKRDVREPKSSDKTHTCPPCPAPELLGGPSVFLFPPKPKDTLMIS
RTPEVTCVVVDVSHEDPEVKFNWYVDGVEVHNAKTKPREEQYNSTYRVVSVLTVLHQDWL
NGKEYKCKVSNKALPAPIEKTISKAKGQPREPQVYTLPPSRDELTKNQVSLTCLVKGFYPSDI
AVEWESNGQPENNYKTTPPVLDSDGSFFLYSKLTVDKSRWQQGNVFSCSVMHEALHNHYT
QKSLSLSPGK. (SEQ ID NO: 552)
>Her111_CDS
atggaagcaccagcgcagcttctcttcctcctgctactctggctcccagataccaccggtcaggtgcagctggtgcagtctggagcagaggtgaaa
aagcccggggagtctctgaagatctcctgtaagggttctggatacagttttgccaactacgggataggctgggtgcgccagatgcccgggaaagg
cctggagtggatgggggtcatctatcctggtgactctgatatcagatacagcccgtccttccaaggccaggtcatcttctcagccgacaggtccatca
gcaccgcctacctgcagtggagcagcctgaaggcctcggacaccgccatgtattattgtgcgagacatctctcgtggctggtcggggggaactac
ggtatggacgtctggggcaaagggacaatggtcaccgtctcgagtggaggcggcggttcaggcggaggtggctctggcggtggcggaagtgca
cagactgtggtgatccaggagccatcgttctcagtgtcccctggagggacagtcacactcacttgtggcttgacctctggctcagtctctactagtcac
taccccagctggtaccagcagaccccaggccaggctccacgcacgctcatctacagcacaaacactcgctcttctggggtccctggtcgcttctct
ggctccatccttgggaacaaagctgccctcaccatcacgggggcccaggcagacgatgaatctgattattattgtgtgctgtatatgggtggtggcat
ttcggtgttcggcggagggaccaaggtcaccgtcctaggtgacgtacgcgagcccaaatcttctgacaaaactcacacatgcccaccgtgcccag
cacctgaactcctgggtggaccgtcagtcttcctcttccccccaaaacccaaggacaccctcatgatctcccggacccctgaggtcacatgcgtggt
ggtggacgtgagccacgaagaccctgaggtcaagttcaactggtacgtggacggcgtggaggtgcataatgccaagacaaagccgcgggagg
agcagtacaacagcacgtaccgtgtggtcagcgtcctcaccgtcctgcaccaggactggctgaatggcaaggagtacaagtgcaaggtctccaac
aaagccctcccagcccccatcgagaaaaccatctccaaagccaaagggcagccccgagaaccacaggtgtacaccctgcccccatcccgggat
gagctgaccaagaaccaggtcagcctgacctgcctggtcaaaggcttctatccaagcgacatcgccgtggagtgggagagcaatgggcagccg
gagaacaactacaagaccacgcctcccgtgctggactccgacggctccttcttcctctacagcaagctcaccgtggacaagagcaggtggcagcagggg
aacgtcttctcatgctccgtgatgcatgaggctctgcacaaccactacacgcagaagagcctctccctgtctccgggtaaatga (SEQ ID NO: 553)
>Her111_Protein_leader-stop
MEAPAQLLFLLLLWLPDTTGQVQLVQSGAEVKKPGESLKISCKGSGYSFANYGIGWVRQMP
GKGLEWMGVIYPGDSDIRYSPSFQGQVIFSADRSISTAYLQWSSLKASDTAMYYCARHLSWL
VGGNYGMDVWGKGTMVTVSSGGGGSGGGGSGGGGSAQTVVIQEPSFSVSPGGTVTLTCGL
TSGSVSTSHYPSWYQQTPGQAPRTLIYSTNTRSSGVPGRFSGSILGNKAALTITGAQADDESD
YYCVLYMGGGISVFGGGTKVTVLGDVREPKSSDKTHTCPPCPAPELLGGPSVFLFPPKPKDTL
MISRTPEVTCVVVDVSHEDPEVKFNWYVDGVEVHNAKTKPREEQYNSTYRVVSVLTVLHQ
DWLNGKEYKCKVSNKALPAPIEKTISKAKGQPREPQVYTLPPSRDELTKNQVSLTCLVKGFY
PSDIAVEWESNGQPENNYKTTPPVLDSDGSFFLYSKLTVDKSRWQQGNVFSCSVMHEALHN
HYTQKSLSLSPGK. (SEQ ID NO: 554)
>Her112_CDS
atggaagcaccagcgcagcttctcttcctcctgctactctggctcccagataccaccggtgaggtgcagctggtgcagtctggggcagaggtgaaa
cagcccggggagtctctgaagatctcctgtaagggttctggatacagctttagcaactactggatcggctgggtgcgccagatgcccgggaaagg
cctggagtggatggggatcatctatcctgatgactctgataccagatacagcccgtccttccaaggccaggtcaccatctcagccgacaggtccatc
agcaccgcctacctgcagtggagcagcctgaaggcctcggacaccgccacgtattactgtgcgagaggaaatgttataaatggaaataccaatgct
tttgatatctgggggcgggggaccacggtcaccgtctcgagtggaggcggcggttcaggcggaggtggctctggcggtggcggaagtgcacag
gctgtggtgatccaggagccatcgttctcagtgtcccctggagggacagtcacactcacttgtggcttgagctctggctcagtctctactggttactac
cccagctggtaccagcagaccccaggccaggctccacgcacgctcatctacaacacaaacagtcgctcttctggggtccctgatcgcttctctggc
tccatccttgggaacaaagctgccctcaccatcacgggggcccaggcagatgatgaatctgattattactgtgtgctgtatatgggtagtggcatttcg
gtattcggcggagggaccaagctgaccgtcctaggtgacgtacgcgagcccaaatcttctgacaaaactcacacatgcccaccgtgcccagcacc
tgaactcctgggtggaccgtcagtcttcctcttccccccaaaacccaaggacaccctcatgatctcccggacccctgaggtcacatgcgtggtggtg
gacgtgagccacgaagaccctgaggtcaagttcaactggtacgtggacggcgtggaggtgcataatgccaagacaaagccgcgggaggagca
gtacaacagcacgtaccgtgtggtcagcgtcctcaccgtcctgcaccaggactggctgaatggcaaggagtacaagtgcaaggtctccaacaaag
ccctcccagcccccatcgagaaaaccatctccaaagccaaagggcagccccgagaaccacaggtgtacaccctgcccccatcccgggatgagc
tgaccaagaaccaggtcagcctgacctgcctggtcaaaggcttctatccaagcgacatcgccgtggagtgggagagcaatgggcagccggaga
acaactacaagaccacgcctcccgtgctggactccgacggctccttcttcctctacagcaagctcaccgtggacaagagcaggtggcagcaggg
gaacgtcttctcatgctccgtgatgcatgaggctctgcacaaccactacacgcagaagagcctctccctgtctccgggtaaatga (SEQ ID NO: 555)
>Her112_Protein_leader-stop
MEAPAQLLFLLLLWLPDTTGEVQLVQSGAEVKQPGESLKISCKGSGYSFSNYWIGWVRQMP
GKGLEWMGIIYPDDSDTRYSPSFQGQVTISADRSISTAYLQWSSLKASDTATYYCARGNVING
NTNAFDIWGRGTTVTVSSGGGGSGGGGSGGGGSAQAVVIQEPSFSVSPGGTVTLTCGLSSGS
VSTGYYPSWYQQTPGQAPRTLIYNTNSRSSGVPDRFSGSILGNKAALTITGAQADDESDYYC
VLYMGSGISVFGGGTKLTVLGDVREPKSSDKTHTCPPCPAPELLGGPSVFLFPPKPKDTLMISR
TPEVTCVVVDVSHEDPEVKFNWYVDGVEVHNAKTKPREEQYNSTYRVVSVLTVLHQDWLN
GKEYKCKVSNKALPAPIEKTISKAKGQPREPQVYTLPPSRDELTKNQVSLTCLVKGFYPSDIA
VEWESNGQPENNYKTTPPVLDSDGSFFLYSKLTVDKSRWQQGNVFSCSVMHEALHNHYTQ
KSLSLSPGK. (SEQ ID NO: 556)
>Her113_CDS
atggaagcaccagcgcagcttctcttcctcctgctactctggctcccagataccaccggtgaggtgctgctgttggagtctgggggaggcttggtac
agcctggggggtccctgagactctcctgtgcagcctctggattcacctttagcagctatgccatgagctgggtccgccaggctccagggaagggg
ctggagtgggtctcagctatcagtggtagtggtggtagcacatactacgcagactccgcgaagggccggttcaccatctccagagacaattccaag
aacacgctgtatctgcaaatgaacagcctgagagccgaggacacggccgtgtattactgtgcgagggacagggtctctaactggaactactacgg
ccaggacagctactttgactactggggccaagggacaatggtcaccgtctcgagtggaggcggcggttcaggcggaggtggctctggcggtggc
ggaagtgcacaggctgtgctgactcagccaccctcagcgtctgggacccccgggcagagggtcaccatctcttgttctggaagcagctccaacat
cggaagtaattatgtatactggtaccagcaactcccaggaacggcccccaaagtcctcatctataggaataatcagcggccctcaggggtccctga
ccgattctctggctccaagtctggcacctcagcgtccctggccatcagtgggctccggtccgaggatgaggctgattattactgtgcatcatgggatg
gcagcctgagtggtccggtgttcggcggagggaccaagctgaccgtcctaggtgacgtacgcgagcccaaatcttctgacaaaactcacacatgc
ccaccgtgcccagcacctgaactcctgggtggaccgtcagtcttcctcttccccccaaaacccaaggacaccctcatgatctcccggacccctgag
gtcacatgcgtggtggtggacgtgagccacgaagaccctgaggtcaagttcaactggtacgtggacggcgtggaggtgcataatgccaagacaa
agccgcgggaggagcagtacaacagcacgtaccgtgtggtcagcgtcctcaccgtcctgcaccaggactggctgaatggcaaggagtacaagt
gcaaggtctccaacaaagccctcccagcccccatcgagaaaaccatctccaaagccaaagggcagccccgagaaccacaggtgtacaccctgc
ccccatcccgggatgagctgaccaagaaccaggtcagcctgacctgcctggtcaaaggcttctatccaagcgacatcgccgtggagtgggagag
caatgggcagccggagaacaactacaagaccacgcctcccgtgctggactccgacggctccttcttcctctacagcaagctcaccgtggacaaga
gcaggtggcagcaggggaacgtcttctcatgctccgtgatgcatgaggctctgcacaaccactacacgcagaagagcctctccctgtctccgggta
aatga (SEQ ID NO: 557)
>Her113_Protein_leader-stop
MEAPAQLLFLLLLWLPDTTGEVLLLESGGGLVQPGGSLRLSCAASGFTFSSYAMSWVRQAPG
KGLEWVSAISGSGGSTYYADSAKGRFTISRDNSKNTLYLQMNSLRAEDTAVYYCARDRVSN
WNYYGQDSYFDYWGQGTMVTVSSGGGGSGGGGSGGGGSAQAVLTQPPSASGTPGQRVTIS
CSGSSSNIGSNYVYWYQQLPGTAPKVLIYRNNQRPSGVPDRFSGSKSGTSASLAISGLRSEDE
ADYYCASWDGSLSGPVFGGGTKLTVLGDVREPKSSDKTHTCPPCPAPELLGGPSVFLFPPKPK
DTLMISRTPEVTCVVVDVSHEDPEVKFNWYVDGVEVHNAKTKPREEQYNSTYRVVSVLTVL
HQDWLNGKEYKCKVSNKALPAPIEKTISKAKGQPREPQVYTLPPSRDELTKNQVSLTCLVKG
FYPSDIAVEWESNGQPENNYKTTPPVLDSDGSFFLYSKLTVDKSRWQQGNVFSCSVMHEALH
NHYTQKSLSLSPGK. (SEQ ID NO: 558)
>Her114_CDS
atggaagcaccagcgcagcttctcttcctcctgctactctggctcccagataccaccggtgaggtgcagctggtgcagtctgggggaggcttggta
cagcctgggggatccctgagactctcctgtgcagcctctggattcacctttagcagctatcccatgcactgggtccgccaggctccaggcaagggg
ctggagtgggtggcagttgtatcgttcgatggatctaagaaatactctgcagactccgtgaagggccgattcaccatctccagagacatctccaaga
acacgctgtatctgcaaatgaacagcctgagagctgaggacacggctgtatattactgtgcgaaagatcgctatgattcggggactttctactacggc
atggacgtctggggccggggcaccctggtcaccgtctcgagtggtggaggcggttcaggcggaggtggcagcggcggtggcggatcgcagtct
gccctgactcagcctgcctccgtgtctggatctcgtggacagtcgatcaccatctcctgcactggaaccactggtgacgttggtggttatgactatgtc
tcctggtaccaacagcacccaggcagagcccccaaactcctcatctatggtaacagcaatcggccctcaggggtccctgatcgcttctctgcctcca
agtccggcaatacggcctccctgaccatctctggactccaggctgaggatgaggctgattatttctgcagcacatatgcaccccccggtattattatgt
tcggcggagggaccaagctgaccgtcctaggtgacgtacgcgagcccaaatcttctgacaaaactcacacatgcccaccgtgcccagcacctga
actcctgggtggaccgtcagtcttcctcttccccccaaaacccaaggacaccctcatgatctcccggacccctgaggtcacatgcgtggtggtggac
gtgagccacgaagaccctgaggtcaagttcaactggtacgtggacggcgtggaggtgcataatgccaagacaaagccgcgggaggagcagtac
aacagcacgtaccgtgtggtcagcgtcctcaccgtcctgcaccaggactggctgaatggcaaggagtacaagtgcaaggtctccaacaaagccct
cccagcccccatcgagaaaaccatctccaaagccaaagggcagccccgagaaccacaggtgtacaccctgcccccatcccgggatgagctgac
caagaaccaggtcagcctgacctgcctggtcaaaggcttctatccaagcgacatcgccgtggagtgggagagcaatgggcagccggagaacaa
ctacaagaccacgcctcccgtgctggactccgacggctccttcttcctctacagcaagctcaccgtggacaagagcaggtggcagcaggggaac
gtcttctcatgctccgtgatgcatgaggctctgcacaaccactacacgcagaagagcctctccctgtctccgggtaaatga (SEQ ID NO: 559)
>Her114_Protein_leader-stop
MEAPAQLLFLLLLWLPDTTGEVQLVQSGGGLVQPGGSLRLSCAASGFTFSSYPMHWVRQAP
GKGLEWVAVVSFDGSKKYSADSVKGRFTISRDISKNTLYLQMNSLRAEDTAVYYCAKDRYD
SGTFYYGMDVWGRGTLVTVSSGGGGSGGGGSGGGGSQSALTQPASVSGSRGQSITISCTGTT
GDVGGYDYVSWYQQHPGRAPKLLIYGNSNRPSGVPDRFSASKSGNTASLTISGLQAEDEADY
FCSTYAPPGIIMFGGGTKLTVLGDVREPKSSDKTHTCPPCPAPELLGGPSVFLFPPKPKDTLMIS
RTPEVTCVVVDVSHEDPEVKFNWYVDGVEVHNAKTKPREEQYNSTYRVVSVLTVLHQDWL
NGKEYKCKVSNKALPAPIEKTISKAKGQPREPQVYTLPPSRDELTKNQVSLTCLVKGFYPSDI
AVEWESNGQPENNYKTTPPVLDSDGSFFLYSKLTVDKSRWQQGNVFSCSVMHEALHNHYT
QKSLSLSPGK. (SEQ ID NO: 560)
>Her115_CDS
atggaagcaccagcgcagcttctcttcctcctgctactctggctcccagataccaccggtgaggtgcagctggtggagtctgggggaggcttggta
cagcctggggggtccctgagactctcctgtgctgcctctggattcacctttgacagctatgccatgagctgggtccgccaggctccagggaagggg
ctggagtgggtctcaattattagtggtagagatggttacacatactacacagactccgtgaagggtcggttcaccatctccagagacaattccaagaa
cacggtgtatctgcaaatgaacagcctgagagccgaggacacgggtgtgtattattgtgcgagaaatggggagtggcccggaatcttagactactg
gggcagggggacaatggtcaccgtctcctcaggtggaggcggttcaggcggaggtggcagcggcggtggcggatcggacatccagatgaccc
agtctccttccaccctgtctgcatctattggagacagagtcaccatcacctgccgggccagtgagggtatttatcactggttggcctggtatcagcaga
agccagggaaagcccctaaactcctgatctataaggcctctagtttagccagtggggccccatcaaggttcagcggcagtggatctgggacagatt
tcactctcaccatcagcagcctgcagcctgatgattttgcaacttattactgccaacaatatagtaattatccgctcactttcggcggagggaccaagct
ggagatcaaacgtgacgtacgcgagcccaaatcttctgacaaaactcacacatgcccaccgtgcccagcacctgaactcctgggtggaccgtcag
tcttcctcttccccccaaaacccaaggacaccctcatgatctcccggacccctgaggtcacatgcgtggtggtggacgtgagccacgaagaccctg
aggtcaagttcaactggtacgtggacggcgtggaggtgcataatgccaagacaaagccgcgggaggagcagtacaacagcacgtaccgtgtgg
tcagcgtcctcaccgtcctgcaccaggactggctgaatggcaaggagtacaagtgcaaggtctccaacaaagccctcccagcccccatcgagaa
aaccatctccaaagccaaagggcagccccgagaaccacaggtgtacaccctgcccccatcccgggatgagctgaccaagaaccaggtcagcct
gacctgcctggtcaaaggcttctatccaagcgacatcgccgtggagtgggagagcaatgggcagccggagaacaactacaagaccacgcctcc
cgtgctggactccgacggctccttcttcctctacagcaagctcaccgtggacaagagcaggtggcagcaggggaacgtcttctcatgctccgtgat
gcatgaggctctgcacaaccactacacgcagaagagcctctccctgtctccgggtaaatga (SEQ ID NO: 561)
>Her115_Protein_leader-stop
MEAPAQLLFLLLLWLPDTTGEVQLVESGGGLVQPGGSLRLSCAASGFTFDSYAMSWVRQAP
GKGLEWVSIISGRDGYTYYTDSVKGRFTISRDNSKNTVYLQMNSLRAEDTGVYYCARNGEW
PGILDYWGRGTMVTVSSGGGGSGGGGSGGGGSDIQMTQSPSTLSASIGDRVTITCRASEGIYH
WLAWYQQKPGKAPKLLIYKASSLASGAPSRFSGSGSGTDFTLTISSLQPDDFATYYCQQYSN
YPLTFGGGTKLEIKRDVREPKSSDKTHTCPPCPAPELLGGPSVFLFPPKPKDTLMISRTPEVTC
VVVDVSHEDPEVKFNWYVDGVEVHNAKTKPREEQYNSTYRVVSVLTVLHQDWLNGKEYK
CKVSNKALPAPIEKTISKAKGQPREPQVYTLPPSRDELTKNQVSLTCLVKGFYPSDIAVEWES
NGQPENNYKTTPPVLDSDGSFFLYSKLTVDKSRWQQGNVFSCSVMHEALHNHYTQKSLSLS
PGK. (SEQ ID NO: 562)
>Her116_CDS
atggaagcaccagcgcagcttctcttcctcctgctactctggctcccagataccaccggtcaggtgcagctggtggagtctgggggaggcgtggtc
cagcctgggaggtccctgagactctcctgtgcagcctctggattcaccttcagtagctatgctatgaactgggtccgccaggctccaggcaagggg
ctggagtgggtggcaactatatcatatgatggaagcaataaatactacgcagactccgtgaagggccgattcaccatctccagagacaattccaaga
acacgctgtatctgcaaatgaacagcctgagagccgaggacacggctgtgtattactgtgcgagaccggccccgtatagcagctccggcgcttttg
atatctggggccaaggcaccctggtcaccgtctcttcaggtggaggcggttcaggcggaggtggcagcggcggtggcggatcggacatccagat
gacccagtctccttccaccctgtctgcatctattggagacagagtcaccatcacctgccgggccagtgagggtatttatcactggttggcctggtatca
gcagaagccagggaaagcccctaaactcctgacctataaggcctctagtttagccagtggggccccatcaaggttcagcggcagtggatctggga
cagatttcactctcaccatcagcagcctgcagcctgatgattttgcaacttattactgccaacaatatagtaattatccgctcactttcggcggagggac
caagctggagatcaaacgtgacgtacgcgagcccaaatcttctgacaaaactcacacatgcccaccgtgcccagcacctgaactcctgggtggac
cgtcagtcttcctcttccccccaaaacccaaggacaccctcatgatctcccggacccctgaggtcacatgcgtggtggtggacgtgagccacgaag
accctgaggtcaagttcaactggtacgtggacggcgtggaggtgcataatgccaagacaaagccgcgggaggagcagtacaacagcacgtacc
gtgtggtcagcgtcctcaccgtcctgcaccaggactggctgaatggcaaggagtacaagtgcaaggtctccaacaaagccctcccagcccccatc
gagaaaaccatctccaaagccaaagggcagccccgagaaccacaggtgtacaccctgcccccatcccgggatgagctgaccaagaaccaggtc
agcctgacctgcctggtcaaaggcttctatccaagcgacatcgccgtggagtgggagagcaatgggcagccggagaacaactacaagaccacg
cctcccgtgctggactccgacggctccttcttcctctacagcaagctcaccgtggacaagagcaggtggcagcaggggaacgtcttctcatgctcc
gtgatgcatgaggctctgcacaaccactacacgcagaagagcctctccctgtctccgggtaaatga (SEQ ID NO: 563)
>Her116_Protein_leader-stop
MEAPAQLLFLLLLWLPDTTGQVQLVESGGGVVQPGRSLRLSCAASGFTFSSYAMNWVRQAP
GKGLEWVATISYDGSNKYYADSVKGRFTISRDNSKNTLYLQMNSLRAEDTAVYYCARPAPY
SSSGAFDIWGQGTLVTVSSGGGGSGGGGSGGGGSDIQMTQSPSTLSASIGDRVTITCRASEGIY
HWLAWYQQKPGKAPKLLTYKASSLASGAPSRFSGSGSGTDFTLTISSLQPDDFATYYCQQYS
NYPLTFGGGTKLEIKRDVREPKSSDKTHTCPPCPAPELLGGPSVFLFPPKPKDTLMISRTPEVT
CVVVDVSHEDPEVKFNWYVDGVEVHNAKTKPREEQYNSTYRVVSVLTVLHQDWLNGKEY
KCKVSNKALPAPIEKTISKAKGQPREPQVYTLPPSRDELTKNQVSLTCLVKGFYPSDIAVEWE
SNGQPENNYKTTPPVLDSDGSFFLYSKLTVDKSRWQQGNVFSCSVMHEALHNHYTQKSLSL
SPGK. (SEQ ID NO: 564)
>Her117_CDS
atggaagcaccagcgcagcttctcttcctcctgctactctggctcccagataccaccggtcagatgcagctggtgcagtctggggcagaggtgaaa
aagcccggggagtctctgaagatgtcctgtaagggttctggatacagctttaccagctactggatcggctgggtgcgccagatgcccgggaaagg
cctggagtggatggggatcatctatcctggtaactccgataccagatacaacccgtccttcgaaggccaggtcaccatctcagccgacaagtccatc
aacaccgccttcctgcagtggaacagcctgaaggcctcggacaccgccatatattattgtgcgcgggctccctgggtgggtgcttttgatacttggg
gccaggggacaatggtcaccgtctcttcaggtggaggcggttcaggcggaggtggcagcggcggtggcggatcggacatcgtgatgacccagt
ctccttccaccctgtctgcatctgtaggagacagagtcaccatcacttgccgggccagtcagggtattagtagctggttggcctggtatcagcagaaa
ccagggagagcccctaaggtcttgatctataaggcatctactttagaaagtggggtcccatcaaggttcagcggcagtggatctgggacagatttca
ctctcaccatcagcagtctgcaacctgaagattttgcaacttactactgtcaacagagttacagtaccccgtggacgttcggccaagggaccaagctg
gagatcaaacgtgacgtacgcgagcccaaatcttctgacaaaactcacacatgcccaccgtgcccagcacctgaactcctgggtggaccgtcagt
cttcctcttccccccaaaacccaaggacaccctcatgatctcccggacccctgaggtcacatgcgtggtggtggacgtgagccacgaagaccctga
ggtcaagttcaactggtacgtggacggcgtggaggtgcataatgccaagacaaagccgcgggaggagcagtacaacagcacgtaccgtgtggt
cagcgtcctcaccgtcctgcaccaggactggctgaatggcaaggagtacaagtgcaaggtctccaacaaagccctcccagcccccatcgagaaa
accatctccaaagccaaagggcagccccgagaaccacaggtgtacaccctgcccccatcccgggatgagctgaccaagaaccaggtcagcctg
acctgcctggtcaaaggcttctatccaagcgacatcgccgtggagtgggagagcaatgggcagccggagaacaactacaagaccacgcctccc
gtgctggactccgacggctccttcttcctctacagcaagctcaccgtggacaagagcaggtggcagcaggggaacgtcttctcatgctccgtgatg
catgaggctctgcacaaccactacacgcagaagagcctctccctgtctccgggtaaatga (SEQ ID NO: 565)
>Her117_Protein_leader-stop
MEAPAQLLFLLLLWLPDTTGQMQLVQSGAEVKKPGESLKMSCKGSGYSFTSYWIGWVRQM
PGKGLEWMGIIYPGNSDTRYNPSFEGQVTISADKSINTAFLQWNSLKASDTAIYYCARAPWV
GAFDTWGQGTMVTVSSGGGGSGGGGSGGGGSDIVMTQSPSTLSASVGDRVTITCRASQGISS
WLAWYQQKPGRAPKVLIYKASTLESGVPSRFSGSGSGTDFTLTISSLQPEDFATYYCQQSYST
PWTFGQGTKLEIKRDVREPKSSDKTHTCPPCPAPELLGGPSVFLFPPKPKDTLMISRTPEVTCV
VVDVSHEDPEVKFNWYVDGVEVHNAKTKPREEQYNSTYRVVSVLTVLHQDWLNGKEYKC
KVSNKALPAPIEKTISKAKGQPREPQVYTLPPSRDELTKNQVSLTCLVKGFYPSDIAVEWESN
GQPENNYKTTPPVLDSDGSFFLYSKLTVDKSRWQQGNVFSCSVMHEALHNHYTQKSLSLSP
GK. (SEQ ID NO: 566)
>Her118_CDS
atggaagcaccagcgcagcttctcttcctcctgctactctggctcccagataccaccggtcaggtgcagctgcaggagtcgggcccaggactggtg
gagccttcggagaccctgtccctcacctgcagtgtctctggcggctccatcagcagcagtagttcctcttggggctggatccgccagcccccaggg
aaggggctggagtggattgggagtatctattacagtggagaaacctattataatccgtccctcaagaggcgtgtcaccatatccacagacacgtcca
agaaccagttgtccctggagctggcctctgtgaccgccgcagacacggctgtatattactgtgcgaggcaagtcaccagttatggttctgactacttt
gactactggggcaaaggaaccctggtcaccgtctcgagtggaggcggcggttcaggcggaggtggctctggcggtggcggaagtgcacaggct
gtggtgatccaggagccatcgttctcagtgtcccctggagggacagtcacacttacttgtggcttgagctctggctcagtctcttctaattactacccca
gctggtaccagcagaccccaggccagactccacgcacgctcatctacaacacaaacactcgctcttctggggtccctgatcgcttctctggctccat
ccttgggaacaaagctgccctcaccatcacgggggcccaggcagatgatgaatctgattattactgtgtgttgtatatgggtagtggcattcgcgtgtt
cggcggagggaccaaggtcaccgtcctaggtgacgtacgcgagcccaaatcttctgacaaaactcacacatgcccaccgtgcccagcacctgaa
ctcctgggtggaccgtcagtcttcctcttccccccaaaacccaaggacaccctcatgatctcccggacccctgaggtcacatgcgtggtggtggac
gtgagccacgaagaccctgaggtcaagttcaactggtacgtggacggcgtggaggtgcataatgccaagacaaagccgcgggaggagcagtac
aacagcacgtaccgtgtggtcagcgtcctcaccgtcctgcaccaggactggctgaatggcaaggagtacaagtgcaaggtctccaacaaagccct
cccagcccccatcgagaaaaccatctccaaagccaaagggcagccccgagaaccacaggtgtacaccctgcccccatcccgggatgagctgac
caagaaccaggtcagcctgacctgcctggtcaaaggcttctatccaagcgacatcgccgtggagtgggagagcaatgggcagccggagaacaa
ctacaagaccacgcctcccgtgctggactccgacggctccttcttcctctacagcaagctcaccgtggacaagagcaggtggcagcaggggaac
gtcttctcatgctccgtgatgcatgaggctctgcacaaccactacacgcagaagagcctctccctgtctccgggtaaatga (SEQ ID NO: 567)
>Her118_Protein_leader-stop
MEAPAQLLFLLLLWLPDTTGQVQLQESGPGLVEPSETLSLTCSVSGGSISSSSSSWGWIRQPPG
KGLEWIGSIYYSGETYYNPSLKRRVTISTDTSKNQLSLELASVTAADTAVYYCARQVTSYGSD
YFDYWGKGTLVTVSSGGGGSGGGGSGGGGSAQAVVIQEPSFSVSPGGTVTLTCGLSSGSVSS
NYYPSWYQQTPGQTPRTLIYNTNTRSSGVPDRFSGSILGNKAALTITGAQADDESDYYCVLY
MGSGIRVFGGGTKVTVLGDVREPKSSDKTHTCPPCPAPELLGGPSVFLFPPKPKDTLMISRTPE
VTCVVVDVSHEDPEVKFNWYVDGVEVHNAKTKPREEQYNSTYRVVSVLTVLHQDWLNGK
EYKCKVSNKALPAPIEKTISKAKGQPREPQVYTLPPSRDELTKNQVSLTCLVKGFYPSDIAVE
WESNGQPENNYKTTPPVLDSDGSFFLYSKLTVDKSRWQQGNVFSCSVMHEALHNHYTQKSL
SLSPGK. (SEQ ID NO: 568)
>Her119_CDS
atggaagcaccagcgcagcttctcttcctcctgctactctggctcccagataccaccggtgaggtccagctggtgcagtctggggcagaggtgaaa
aagtccggggagtctctgaagatctcctgtaagggttctggatacagctttaccagtaattggatcggctgggtgcgccagatgcccgggaaaggc
ctggagtggatggggatcatctatcctggtgactctgataccagatacagcccgtccttccaaggccaggtcaccatctcagccgacaagtccgtca
gcaccgcctacctgcagtggagcagcctgaaggcctcggacaccgccatgtattattgtgcgagaatgctgacggactgtagtagtaccagctgct
attcagccggtatggacgtctggggcaaaggcaccctggtcaccgtctcgagtggaggcggcggttcaggcggaggtggctctggcggtggcg
gaagtgcacaggctgtggtgatccaggagccatcgttctcagtgtcccctggagggacagtcacactcacttgtggcttgagttctggctcagtctct
cctagttactaccccagctggtaccagcagaccccaggccaggctccacgcacactcatctacagcacaaacactcgctcttctggggtccctgat
cgcttctctggctccatccttgggaacaaagctgccctcaccatcacgggggcccaggcagatgatgaatctgattattactgtgtgctgtatatgggt
agtggctcttgggtgttcggcggagggaccaagctgaccgtcctaggtgacgtacgcgagcccaaatcttctgacaaaactcacacatgcccacc
gtgcccagcacctgaactcctgggtggaccgtcagtcttcctcttccccccaaaacccaaggacaccctcatgatctcccggacccctgaggtcac
atgcgtggtggtggacgtgagccacgaagaccctgaggtcaagttcaactggtacgtggacggcgtggaggtgcataatgccaagacaaagccg
cgggaggagcagtacaacagcacgtaccgtgtggtcagcgtcctcaccgtcctgcaccaggactggctgaatggcaaggagtacaagtgcaag
gtctccaacaaagccctcccagcccccatcgagaaaaccatctccaaagccaaagggcagccccgagaaccacaggtgtacaccctgcccccat
cccgggatgagctgaccaagaaccaggtcagcctgacctgcctggtcaaaggcttctatccaagcgacatcgccgtggagtgggagagcaatgg
gcagccggagaacaactacaagaccacgcctcccgtgctggactccgacggctccttcttcctctacagcaagctcaccgtggacaagagcaggt
ggcagcaggggaacgtcttctcatgctccgtgatgcatgaggctctgcacaaccactacacgcagaagagcctctccctgtctccgggtaaatga
(SEQ ID NO: 569)
>Her119_Protein_leader-stop
MEAPAQLLFLLLLWLPDTTGEVQLVQSGAEVKKSGESLKISCKGSGYSFTSNWIGWVRQMP
GKGLEWMGIIYPGDSDTRYSPSFQGQVTISADKSVSTAYLQWSSLKASDTAMYYCARMLTD
CSSTSCYSAGMDVWGKGTLVTVSSGGGGSGGGGSGGGGSAQAVVIQEPSFSVSPGGTVTLT
CGLSSGSVSPSYYPSWYQQTPGQAPRTLIYSTNTRSSGVPDRFSGSILGNKAALTITGAQADDE
SDYYCVLYMGSGSWVFGGGTKLTVLGDVREPKSSDKTHTCPPCPAPELLGGPSVFLFPPKPK
DTLMISRTPEVTCVVVDVSHEDPEVKFNWYVDGVEVHNAKTKPREEQYNSTYRVVSVLTVL
HQDWLNGKEYKCKVSNKALPAPIEKTISKAKGQPREPQVYTLPPSRDELTKNQVSLTCLVKG
FYPSDIAVEWESNGQPENNYKTTPPVLDSDGSFFLYSKLTVDKSRWQQGNVFSCSVMHEALH
NHYTQKSLSLSPGK. (SEQ ID NO: 570)
>Her120_CDS
atggaagcaccagcgcagcttctcttcctcctgctactctggctcccagataccaccggtgaggtgcagctggtgcagtctggggcagaggtgaaa
aagcccggggagtctctgaagatctcctgtaagggctctggatacagctttaccagctattggatcggctgggtgcgccagatgcccgggaaagg
cctggagtggatggggatcatctatcctggtgactctgataccagatacagcccgtccttccaaggccaggtcaccatctcagccgacaagtccatc
agcaccgcctacctgcagtggagcagcctgaaggcctcggacaccgccatgttttactgtgcgagactcaatgatagtagtggttatacgactaact
ttgactactggggccaaggcaccctggtcaccgtctcgagtggaggcggcggttcaggcggaggtggctctggcggtggcggaagtgcacagg
ctgtggtgatccaggagccatcgttctcagtgtcccctggagggacagtcacactcacttgtggcttgagctctggctcagtctctactcgttacaacc
ccagctggtaccagcagaccccaggccaggctccacgcacgctcatctacagtacaaacactcgttcttctggggtccctgaccgcttctctggctc
catccttgggaacaaagctgccctcaccatcacgggggcccaggcagatgatgaatctgattattactgtgcgctgtatatgggtagtggcatttggg
tgttcggcggagggaccaagctgaccgtcctaggtgacgtacgcgagcccaaatcttctgacaaaactcacacatgcccaccgtgcccagcacct
gaactcctgggtggaccgtcagtcttcctcttccccccaaaacccaaggacaccctcatgatctcccggacccctgaggtcacatgcgtggtggtg
gacgtgagccacgaagaccctgaggtcaagttcaactggtacgtggacggcgtggaggtgcataatgccaagacaaagccgcgggaggagca
gtacaacagcacgtaccgtgtggtcagcgtcctcaccgtcctgcaccaggactggctgaatggcaaggagtacaagtgcaaggtctccaacaaag
ccctcccagcccccatcgagaaaaccatctccaaagccaaagggcagccccgagaaccacaggtgtacaccctgcccccatcccgggatgagc
tgaccaagaaccaggtcagcctgacctgcctggtcaaaggcttctatccaagcgacatcgccgtggagtgggagagcaatgggcagccggaga
acaactacaagaccacgcctcccgtgctggactccgacggctccttcttcctctacagcaagctcaccgtggacaagagcaggtggcagcaggg
gaacgtcttctcatgctccgtgatgcatgaggctctgcacaaccactacacgcagaagagcctctccctgtctccgggtaaatga (SEQ ID NO: 571)
>Her120_Protein_leader-stop
MEAPAQLLFLLLLWLPDTTGEVQLVQSGAEVKKPGESLKISCKGSGYSFTSYWIGWVRQMP
GKGLEWMGIIYPGDSDTRYSPSFQGQVTISADKSISTAYLQWSSLKASDTAMFYCARLNDSS
GYTTNFDYWGQGTLVTVSSGGGGSGGGGSGGGGSAQAVVIQEPSFSVSPGGTVTLTCGLSSG
SVSTRYNPSWYQQTPGQAPRTLIYSTNTRSSGVPDRFSGSILGNKAALTITGAQADDESDYYC
ALYMGSGIWVFGGGTKLTVLGDVREPKSSDKTHTCPPCPAPELLGGPSVFLFPPKPKDTLMIS
RTPEVTCVVVDVSHEDPEVKFNWYVDGVEVHNAKTKPREEQYNSTYRVVSVLTVLHQDWL
NGKEYKCKVSNKALPAPIEKTISKAKGQPREPQVYTLPPSRDELTKNQVSLTCLVKGFYPSDI
AVEWESNGQPENNYKTTPPVLDSDGSFFLYSKLTVDKSRWQQGNVFSCSVMHEALHNHYT
QKSLSLSPGK. (SEQ ID NO: 572)
>Her121_CDS
atggaagcaccagcgcagcttctcttcctcctgctactctggctcccagataccaccggtcaggtgcagctggtgcaatctggggcagaggtgaaa
aagcccggggagtctctgaagatctcctgtaagggttctggatacagctttaccagccagtggatcgcctgggtgcgccagatgcccgggaaagg
cctggagtggatggggatcatctatcctggtgactctgatacgagatacagcccgtccttccaaggccaggtcaccatctcagccgacaagtccatc
aacaccgcctacctgcagtggagcagcctgaaggcctcggacaccgccatgtattactgtgcgagacattcggggagctctggagattactacca
ctactacggtatggacgtctggggccaagggacaatggtcaccgtctcgagtggaggcggcggttcaggcggaggtggctctggcggtggcgg
aagtgcacagactgtggtgatccaggagccatcgttctcagtgtcccctggagggacagtcacactcacttgtggcttgagctctggctcagtctcta
ctagttactaccccagctggtaccagcagaccccaggccaggctccacgcacgctcatctacagcacaaacactcgctcttctggggtccctgatc
gcttctctggctccatccttgggaacaaagctgccctcaccatcacgggggcccaggcagatgatggatctgattattactgtgtgctgtatatgggg
agtggcatttcggtgttcggcggagggaccaagctgaccgtcctaggtgacgtacgcgagcccaaatcttctgacaaaactcacacatgcccacc
gtgcccagcacctgaactcctgggtggaccgtcagtcttcctcttccccccaaaacccaaggacaccctcatgatctcccggacccctgaggtcac
atgcgtggtggtggacgtgagccacgaagaccctgaggtcaagttcaactggtacgtggacggcgtggaggtgcataatgccaagacaaagccg
cgggaggagcagtacaacagcacgtaccgtgtggtcagcgtcctcaccgtcctgcaccaggactggctgaatggcaaggagtacaagtgcaag
gtctccaacaaagccctcccagcccccatcgagaaaaccatctccaaagccaaagggcagccccgagaaccacaggtgtacaccctgcccccat
cccgggatgagctgaccaagaaccaggtcagcctgacctgcctggtcaaaggcttctatccaagcgacatcgccgtggagtgggagagcaatgg
gcagccggagaacaactacaagaccacgcctcccgtgctggactccgacggctccttcttcctctacagcaagctcaccgtggacaagagcaggt
ggcagcaggggaacgtcttctcatgctccgtgatgcatgaggctctgcacaaccactacacgcagaagagcctctccctgtctcc
gggtaaatga (SEQ ID NO: 573)
>Her121_Protein_leader-stop
MEAPAQLLFLLLLWLPDTTGQVQLVQSGAEVKKPGESLKISCKGSGYSFTSQWIAWVRQMP
GKGLEWMGIIYPGDSDTRYSPSFQGQVTISADKSINTAYLQWSSLKASDTAMYYCARHSGSS
GDYYHYYGMDVWGQGTMVTVSSGGGGSGGGGSGGGGSAQTVVIQEPSFSVSPGGTVTLTC
GLSSGSVSTSYYPSWYQQTPGQAPRTLIYSTNTRSSGVPDRFSGSILGNKAALTITGAQADDG
SDYYCVLYMGSGISVFGGGTKLTVLGDVREPKSSDKTHTCPPCPAPELLGGPSVFLFPPKPKD
TLMISRTPEVTCVVVDVSHEDPEVKFNWYVDGVEVHNAKTKPREEQYNSTYRVVSVLTVLH
QDWLNGKEYKCKVSNKALPAPIEKTISKAKGQPREPQVYTLPPSRDELTKNQVSLTCLVKGF
YPSDIAVEWESNGQPENNYKTTPPVLDSDGSFFLYSKLTVDKSRWQQGNVFSCSVMHEALH
NHYTQKSLSLSPGK. (SEQ ID NO: 574)
>Her122_CDS
atggaagcaccagcgcagcttctcttcctcctgctactctggctcccagataccaccggtcaggtgcagctgcaggagtcgggcccaggactggtg
aagccttcggagaccctgtccctcacctgcactgtctctggttactccattagcagtggttactactggggctggatccggcagcccccagggaggg
ggctggagtggattgggactatctatcatagtgggagcacctactacaacccgtccctcaagagtcgactcaccatatcagtagacacgtccgaga
accaattctccctgaagctgagttctgtgaccgccgcagacacggccgtgtattactgtgcgagagggatagcaggtcggacccattatgactactg
gggccaggggacaatggtcaccgtctcgagtggaggcggcggttcaggcggaggtggctctggcggtggcggaagtgcacaggctgtgctga
ctcagccgtcctcagtgtctggggccccagggcagagggtaaccatctcctgcagtgggagcagctccaacatcggggcaggttatgatgtacac
tggtaccagcagctcccaggagcagcccccaaactcctcatctatagtaacaatcatcggccctcaggggtccctgaccgattctctggctccaagt
ctggcacctcagcctccctggccatcactgggctccagactgaggatgaggctgattattactgccagtcctatgacagaagcctgagcggtaggg
tgttcggcggagggaccaagctgaccgtcctaggtgacgtacgcgagcccaaatcttctgacaaaactcacacatgcccaccgtgcccagcacct
gaactcctgggtggaccgtcagtcttcctcttccccccaaaacccaaggacaccctcatgatctcccggacccctgaggtcacatgcgtggtggtg
gacgtgagccacgaagaccctgaggtcaagttcaactggtacgtggacggcgtggaggtgcataatgccaagacaaagccgcgggaggagca
gtacaacagcacgtaccgtgtggtcagcgtcctcaccgtcctgcaccaggactggctgaatggcaaggagtacaagtgcaaggtctccaacaaag
ccctcccagcccccatcgagaaaaccatctccaaagccaaagggcagccccgagaaccacaggtgtacaccctgcccccatcccgggatgagc
tgaccaagaaccaggtcagcctgacctgcctggtcaaaggcttctatccaagcgacatcgccgtggagtgggagagcaatgggcagccggaga
acaactacaagaccacgcctcccgtgctggactccgacggctccttcttcctctacagcaagctcaccgtggacaagagcaggtggcagcaggg
gaacgtcttctcatgctccgtgatgcatgaggctctgcacaaccactacacgcagaagagcctctccctgtctccgggtaaatga (SEQ ID NO: 575)
>Her122_Protein_leader-stop
MEAPAQLLFLLLLWLPDTTGQVQLQESGPGLVKPSETLSLTCTVSGYSISSGYYWGWIRQPPG
RGLEWIGTIYHSGSTYYNPSLKSRLTISVDTSENQFSLKLSSVTAADTAVYYCARGIAGRTHY
DYWGQGTMVTVSSGGGGSGGGGSGGGGSAQAVLTQPSSVSGAPGQRVTISCSGSSSNIGAG
YDVHWYQQLPGAAPKLLIYSNNHRPSGVPDRFSGSKSGTSASLAITGLQTEDEADYYCQSYD
RSLSGRVFGGGTKLTVLGDVREPKSSDKTHTCPPCPAPELLGGPSVFLFPPKPKDTLMISRTPE
VTCVVVDVSHEDPEVKFNWYVDGVEVHNAKTKPREEQYNSTYRVVSVLTVLHQDWLNGK
EYKCKVSNKALPAPIEKTISKAKGQPREPQVYTLPPSRDELTKNQVSLTCLVKGFYPSDIAVE
WESNGQPENNYKTTPPVLDSDGSFFLYSKLTVDKSRWQQGNVFSCSVMHEALHNHYTQKSL
SLSPGK. (SEQ ID NO: 576)
>Her123_CDS
atggaagcaccagcgcagcttctcttcctcctgctactctggctcccagataccaccggtcaggtccagctggtgcagtctggggctgaggtgaag
aagcctggggcctcagtgaaggtctcctgcaaggcttctggttacacctttaccagctatggtatcagctgggtgcgacaggcccctggacaaggg
cttgagtggatgggatggatcagcgcttacaatggtaacacaaactatgcacagaagctccagggcagagtcaccatgaccacagacacatccac
gagcacagcctacatggagctgaggagcctgagatctgacgacacggccgtgtattactgtgcgagagtggggtcgggatattgtagtggtggta
gctgctacgtgggctggttcgacccctggggccgggggacaatggtcaccgtctcgagtggaggcggcggttcaggcggaggtggctctggcg
gtggcggaagtgcactttcttctgagctgactcaggaccctgctgtgtctgtggccttgggacagacagtcaagatcacatgccaaggagacagcct
cagtgcctattatgcaacctggtaccagcagaagccaggccaggcccctgtacttgtcatctatggtaaaaacaagcggccgtccgggatcccaga
ccgattctctggctccaagtcaggaaacacagcttccttgaccatcacgggggctcaggcggaagatgaggctgactattactgtaactcccggga
cagcagtggtaatgatcattatgtcttcggaactgggaccaagctgaccgttctaggtgacgtacgcgagcccaaatcttctgacaaaactcacacat
gcccaccgtgcccagcacctgaactcctgggtggaccgtcagtcttcctcttccccccaaaacccaaggacaccctcatgatctcccggacccctg
aggtcacatgcgtggtggtggacgtgagccacgaagaccctgaggtcaagttcaactggtacgtggacggcgtggaggtgcataatgccaagac
aaagccgcgggaggagcagtacaacagcacgtaccgtgtggtcagcgtcctcaccgtcctgcaccaggactggctgaatggcaaggagtacaa
gtgcaaggtctccaacaaagccctcccagcccccatcgagaaaaccatctccaaagccaaagggcagccccgagaaccacaggtgtacaccct
gcccccatcccgggatgagctgaccaagaaccaggtcagcctgacctgcctggtcaaaggcttctatccaagcgacatcgccgtggagtgggag
agcaatgggcagccggagaacaactacaagaccacgcctcccgtgctggactccgacggctccttcttcctctacagcaagctcaccgtggacaa
gagcaggtggcagcaggggaacgtcttctcatgctccgtgatgcatgaggctctgcacaaccactacacgcagaagagcctctccctgtctccgg
gtaaatga (SEQ ID NO: 577)
>Her123_Protein_leader-stop
MEAPAQLLFLLLLWLPDTTGQVQLVQSGAEVKKPGASVKVSCKASGYTFTSYGISWVRQAP
GQGLEWMGWISAYNGNTNYAQKLQGRVTMTTDTSTSTAYMELRSLRSDDTAVYYCARVG
SGYCSGGSCYVGWFDPWGRGTMVTVSSGGGGSGGGGSGGGGSALSSELTQDPAVSVALGQ
TVKITCQGDSLSAYYATWYQQKPGQAPVLVIYGKNKRPSGIPDRFSGSKSGNTASLTITGAQA
EDEADYYCNSRDSSGNDHYVFGTGTKLTVLGDVREPKSSDKTHTCPPCPAPELLGGPSVFLFP
PKPKDTLMISRTPEVTCVVVDVSHEDPEVKFNWYVDGVEVHNAKTKPREEQYNSTYRVVSV
LTVLHQDWLNGKEYKCKVSNKALPAPIEKTISKAKGQPREPQVYTLPPSRDELTKNQVSLTC
LVKGFYPSDIAVEWESNGQPENNYKTTPPVLDSDGSFFLYSKLTVDKSRWQQGNVFSCSVM
HEALHNHYTQKSLSLSPGK. (SEQ ID NO: 578)
>Her124_CDS
atggaagcaccagcgcagcttctcttcctcctgctactctggctcccagataccaccggtgaggtgcagctggtgcagtctggggcagaagtcaag
aggcccggagagtctctgaagatctcctgtagggcctctggatacatctttacgaacaattgggtcgcctgggtgcgccagcagcccgggaaagg
cctggagtggatggggatcatctatcctggtgactctgacaccagatacagcccgtccttccaaggccaggtcactttctcggccgacacgtccatc
aacaccgcctacctacagtggaatagcctgaaggcctcggacaccgccacttacttctgtgcgcgagaggcctacaactcatacgaatattacggt
atggacgtctgggggcgagggaccacggtcaccgtctcgagtggaggcggcggttcaggcggaggtggctctggcggtggcggaagtgcaca
gactgtggtgatccaggagccatcgttctcagtgtcccctggagggacagtcacactcacttgtggcttgagctctggctcagtctctactaattacta
ccccagctggtaccagcagaccccaggccaggctccacgcacgctcatctacaacacaaacactcgctcttctggggtccctgatcgcttctctgg
ctccatccttgggaacaaagctgccctcaccatcacgggggcccaggcagatgatgaatctgattattactgtgtgctgtatatgggtagtggcatttc
ggtgttcggcggagggaccaaggtcaccgtcctaggtgacgtacgcgagcccaaatcttctgacaaaactcacacatgcccaccgtgcccagca
cctgaactcctgggtggaccgtcagtcttcctcttccccccaaaacccaaggacaccctcatgatctcccggacccctgaggtcacatgcgtggtgg
tggacgtgagccacgaagaccctgaggtcaagttcaactggtacgtggacggcgtggaggtgcataatgccaagacaaagccgcgggaggagc
agtacaacagcacgtaccgtgtggtcagcgtcctcaccgtcctgcaccaggactggctgaatggcaaggagtacaagtgcaaggtctccaacaaa
gccctcccagcccccatcgagaaaaccatctccaaagccaaagggcagccccgagaaccacaggtgtacaccctgcccccatcccgggatgag
ctgaccaagaaccaggtcagcctgacctgcctggtcaaaggcttctatccaagcgacatcgccgtggagtgggagagcaatgggcagccggag
aacaactacaagaccacgcctcccgtgctggactccgacggctccttcttcctctacagcaagctcaccgtggacaagagcaggtggcagcaggg
gaacgtcttctcatgctccgtgatgcatgaggctctgcacaaccactacacgcagaagagcctctccctgtctccgggtaaatga (SEQ ID NO: 579)
>Her124_Protein_leader-stop
MEAPAQLLFLLLLWLPDTTGEVQLVQSGAEVKRPGESLKISCRASGYIFTNNWVAWVRQQP
GKGLEWMGIIYPGDSDTRYSPSFQGQVTFSADTSINTAYLQWNSLKASDTATYFCAREAYNS
YEYYGMDVWGRGTTVTVSSGGGGSGGGGSGGGGSAQTVVIQEPSFSVSPGGTVTLTCGLSS
GSVSTNYYPSWYQQTPGQAPRTLIYNTNTRSSGVPDRFSGSILGNKAALTITGAQADDESDYY
CVLYMGSGISVFGGGTKVTVLGDVREPKSSDKTHTCPPCPAPELLGGPSVFLFPPKPKDTLMI
SRTPEVTCVVVDVSHEDPEVKFNWYVDGVEVHNAKTKPREEQYNSTYRVVSVLTVLHQDW
LNGKEYKCKVSNKALPAPIEKTISKAKGQPREPQVYTLPPSRDELTKNQVSLTCLVKGFYPSD
IAVEWESNGQPENNYKTTPPVLDSDGSFFLYSKLTVDKSRWQQGNVFSCSVMHEALHNHYT
QKSLSLSPGK. (SEQ ID NO: 580)
>Her125_CDS
atggaagcaccagcgcagcttctcttcctcctgctactctggctcccagataccaccggtcaggtccagctggtgcagtctggaggagaggtgaaa
aagcccggggagtctctgaagatctcctgtaaggtttctggagacaagtttgccaactactggatcgcctgggtgcgccaggtgcccgggagagg
cctggagtggatgggaatcatctatcctagtgactctgatgtcagatatagtccgtccttccaaggccaagtcaccatgtcagccgacaagtccacca
gcaccgcctacttgcagttgagcagcctgaaggcctcggacaccgccatgtattactgtgcaagacaggtgggtggactggttactacagacactg
actcctacttctacggcatggacgtctggggccaaggaaccctggtcaccgtctcgagtggaggcggcggttcaggcggaggtggctctggcggt
ggcggaagtgcacaggctgtggtgatccaggagccatcgttctcagtgtcccctggagggacagtcacactcacttgtggcttgagctctggccca
gtctctactagttactaccccagctggttccaacagaccccaggccaggctccacgcacgctcatctacagcacaaacactcgctcttctggggtcc
ctgatcgcttctctggctccatccttgggaacaaagctgccctcaccatcacgggggcccaggcagatgatgaatctgattattactgtgtgttgtatgt
gggtagtggcatttcgctattcggcggggggaccaaggtcaccgtcctaggtgacgtacgcgagcccaaatcttctgacaaaactcacacatgccc
accgtgcccagcacctgaactcctgggtggaccgtcagtcttcctcttccccccaaaacccaaggacaccctcatgatctcccggacccctgaggt
cacatgcgtggtggtggacgtgagccacgaagaccctgaggtcaagttcaactggtacgtggacggcgtggaggtgcataatgccaagacaaag
ccgcgggaggagcagtacaacagcacgtaccgtgtggtcagcgtcctcaccgtcctgcaccaggactggctgaatggcaaggagtacaagtgc
aaggtctccaacaaagccctcccagcccccatcgagaaaaccatctccaaagccaaagggcagccccgagaaccacaggtgtacaccctgccc
ccatcccgggatgagctgaccaagaaccaggtcagcctgacctgcctggtcaaaggcttctatccaagcgacatcgccgtggagtgggagagca
atgggcagccggagaacaactacaagaccacgcctcccgtgctggactccgacggctccttcttcctctacagcaagctcaccgtggacaagagc
aggtggcagcaggggaacgtcttctcatgctccgtgatgcatgaggctctgcacaaccactacacgcagaagagcctctccctgtctccgggtaaa
tga (SEQ ID NO: 581)
>Her125_Protein_leader-stop
MEAPAQLLFLLLLWLPDTTGQVQLVQSGGEVKKPGESLKISCKVSGDKFANYWIAWVRQVP
GRGLEWMGIIYPSDSDVRYSPSFQGQVTMSADKSTSTAYLQLSSLKASDTAMYYCARQVGG
LVTTDTDSYFYGMDVWGQGTLVTVSSGGGGSGGGGSGGGGSAQAVVIQEPSFSVSPGGTVT
LTCGLSSGPVSTSYYPSWFQQTPGQAPRTLIYSTNTRSSGVPDRFSGSILGNIKAALTITGAQAD
DESDYYCVLYVGSGISLFGGGTKVTVLGDVREPKSSDKTHTCPPCPAPELLGGPSVFLFPPKP
KDTLMISRTPEVTCVVVDVSHEDPEVKFNWYVDGVEVHNAKTKPREEQYNSTYRVVSVLTV
LHQDWLNGKEYKCKVSNKALPAPIEKTISKAKGQPREPQVYTLPPSRDELTKNQVSLTCLVK
GFYPSDIAVEWESNGQPENNYKTTPPVLDSDGSFFLYSKLTVDKSRWQQGNVFSCSVMHEAL
HNHYTQKSLSLSPGK. (SEQ ID NO: 582)
>Her126_CDS
atggaagcaccagcgcagcttctcttcctcctgctactctggctcccagataccaccggtgaggtgcagctggtggagtccgggggaggcttggtc
cagccgggggggtccctaaaactttcctgtgcagcctctgggctcaatttcgatatctctactgtgcactgggtccgccaggcttccgggaaagggc
tggagtggattggccgtattagaagcaaagcttacaattatgcgacagcatatactgagtcgctgaagggcaggttcatcatctccagagatgagtca
aagaatacggcggatctgcaaatcaacagcctgaaaaccgaggacacggccacatattactgtagtatgaccttcggtgactactactactacggc
atggacgtctggggccggggcaccctggtcaccgtctcgagtggaggcggcggttcaggcggaggtggctctggcggtggcggaagtgcaca
ggctgtgctgactcagccgtcctcagtgtctggggccccagggcagagggtcaccatcacctgcactggaagcagctccaacatcggggccggt
tacgatgttcactggtaccagcaacttccaggaacagccccaaactcctcatctatagtaattcttatcggccctctggggtctctgaccgattctctg
gctccaagtctggcacctcagcctccctggtcatcgctggactccaggctgaggatgaggctgattattactgtcagtcctatgacagcagtcattgg
tttttcggcggagggaccaagctgaccgtcctaggtgacgtacgcgagcccaaatcttctgacaaaactcacacatgcccaccgtgcccagcacct
gaactcctgggtggaccgtcagtcttcctcttccccccaaaacccaaggacaccctcatgatctcccggacccctgaggtcacatgcgtggtggtg
gacgtgagccacgaagaccctgaggtcaagttcaactggtacgtggacggcgtggaggtgcataatgccaagacaaagccgcgggaggagca
gtacaacagcacgtaccgtgtggtcagcgtcctcaccgtcctgcaccaggactggctgaatggcaaggagtacaagtgcaaggtctccaacaaag
ccctcccagcccccatcgagaaaaccatctccaaagccaaagggcagccccgagaaccacaggtgtacaccctgcccccatcccgggatgagc
tgaccaagaaccaggtcagcctgacctgcctggtcaaaggcttctatccaagcgacatcgccgtggagtgggagagcaatgggcagccggaga
acaactacaagaccacgcctcccgtgctggactccgacggctccttcttcctctacagcaagctcaccgtggacaagagcaggtggcagcaggg
gaacgtcttctcatgctccgtgatgcatgaggctctgcacaaccactacacgcagaagagcctctccctgtctccgggtaaatga (SEQ ID NO: 583)
>Her126_Protein_leader-stop
MEAPAQLLFLLLLWLPDTTGEVQLVESGGGLVQPGGSLKLSCAASGLNFDISTVHWVRQAS
GKGLEWIGRIRSKAYNYATAYTESLKGRFIISRDESKNTADLQINSLKTEDTATYYCSMTFGD
YYYYGMDVWGRGTLVTVSSGGGGSGGGGSGGGGSAQAVLTQPSSVSGAPGQRVTITCTGSS
SNIGAGYDVHWYQQLPGTAPKLLIYSNSYRPSGVSDRFSGSKSGTSASLVIAGLQAEDEADY
YCQSYDSSHWFFGGGTKLTVLGDVREPKSSDKTHTCPPCPAPELLGGPSVFLFPPKPKDTLMI
SRTPEVTCVVVDVSHEDPEVKFNWYVDGVEVHNAKTKPREEQYNSTYRVVSVLTVLHQDW
LNGKEYKCKVSNKALPAPIEKTISKAKGQPREPQVYTLPPSRDELTKNQVSLTCLVKGFYPSD
IAVEWESNGQPENNYKTTPPVLDSDGSFFLYSKLTVDKSRWQQGNVFSCSVMHEALHNHYT
QKSLSLSPGK. (SEQ ID NO: 584)
>Her127_CDS
atggaagcaccagcgcagcttctcttcctcctgctactctggctcccagataccaccggtcaggtccagctggtgcagtctggaggagaggtgaaa
aagcccggggagtctctgaagatctcctgtaaggtttctggagacagctttaccaactactggatcgcctgggtgcgccagatgcccgggagaggc
ctggagtggatgggaatcatctatcctagtgactctgatgtcagatatagtccgtccttccaaggccaggtcaccatgtcagccgacaagtccatcag
caccgcctacctgcagttgagcagcctgaaggcctcggacaccgccatgtattactgtgcaagacaggtgggtggactggttactacagacactga
ctcctacttctacggcatggacgtctggggcagaggcaccctggtcaccgtctcgagtggaggcggcggttcaggcggaggtggctctggcggt
ggcggaagtgcacagactgtggtgatccaggagccatcgttctcagtgtcccctggagggacagtcacactcacttgtgccttgaactccggctca
gtctctactaattactaccccagctggtaccagcagaccccaggccaggctccacgcacgctcatccacagcacaaacactcgctcttctggggtc
cctgatcgcttctctggctccatccttgggaacaatgctgccctcaccatcacgggggcccaggcagaggatgaatctgattattactgtgcgctatat
atgggtagtggcatttcgatattcggcggagggaccaagctgaccgtcctaggtgacgtacgcgagcccaaatcttctgacaaaactcacacatgc
ccaccgtgcccagcacctgaactcctgggtggaccgtcagtcttcctcttccccccaaaacccaaggacaccctcatgatctcccggacccctgag
gtcacatgcgtggtggtggacgtgagccacgaagaccctgaggtcaagttcaactggtacgtggacggcgtggaggtgcataatgccaagacaa
agccgcgggaggagcagtacaacagcacgtaccgtgtggtcagcgtcctcaccgtcctgcaccaggactggctgaatggcaaggagtacaagt
gcaaggtctccaacaaagccctcccagcccccatcgagaaaaccatctccaaagccaaagggcagccccgagaaccacaggtgtacaccctgc
ccccatcccgggatgagctgaccaagaaccaggtcagcctgacctgcctggtcaaaggcttctatccaagcgacatcgccgtggagtgggagag
caatgggcagccggagaacaactacaagaccacgcctcccgtgctggactccgacggctccttcttcctctacagcaagctcaccgtggacaaga
gcaggtggcagcaggggaacgtcttctcatgctccgtgatgcatgaggctctgcacaaccactacacgcagaagagcctctccctgtctccgggta
aatga (SEQ ID NO: 585)
>Her127_Protein_leader-stop
MEAPAQLLFLLLLWLPDTTGQVQLVQSGGEVKKPGESLKISCKVSGDSFTNYWIAWVRQMP
GRGLEWMGIIYPSDSDVRYSPSFQGQVTMSADKSISTAYLQLSSLKASDTAMYYCARQVGGL
VTTDTDSYFYGMDVWGRGTLVTVSSGGGGSGGGGSGGGGSAQTVVIQEPSFSVSPGGTVTL
TCALNSGSVSTNYYPSWYQQTPGQAPRTLIHSTNTRSSGVPDRFSGSILGNNAALTITGAQAE
DESDYYCALYMGSGISIFGGGTKLTVLGDVREPKSSDKTHTCPPCPAPELLGGPSVFLFPPKPK
DTLMISRTPEVTCVVVDVSHEDPEVKFNWYVDGVEVHNAKTKPREEQYNSTYRVVSVLTVL
HQDWLNGKEYKCKVSNKALPAPIEKTISKAKGQPREPQVYTLPPSRDELTKNQVSLTCLVKG
FYPSDIAVEWESNGQPENNYKTTPPVLDSDGSFFLYSKLTVDKSRWQQGNVFSCSVMHEALH
NHYTQKSLSLSPGK. (SEQ ID NO: 586)
>Her128_CDS
atggaagcaccagcgcagcttctcttcctcctgctactctggctcccagataccaccggtgaggtccagctggtgcagtctggagcagaggtgaaa
aagcccggggagtctctgaagatctcctgtaagggttctggatacagctttcccagctactggatcggctgggtgcgccagatgcccgggaaagg
cctggagtggatggggatcatctatcctggtgactctgaaaccagatacagcccgtccttccaaggccaggtcaccatctcagccgacaagtccatc
agcaccgcctacctgcagtggagcagcctgaaggcctcggacaccgccatgtattactgtgtgagacatctaaaaccagtggctggtcccgcttgg
cacgactacggtatggacgtctggggccagggcaccctggtcaccgtctcgagtggaggcggcggttcaggcggaggtggctctggcggtggc
ggaagtgcacaggctgtggtgctccaggagccatcgatctcagtgtcccctggagggacagtcacactcacttgtggcttaacctctgactcagtct
cgactacttactaccccagctggtaccagcagaccccaggccagactccacgcacactcagctacagcacaaatactcgctcttctggggtccctg
atcgcttctctggctccatccttgggaacaaagctgccctcaccatcgcgggggcccaggcagatgatgaagctgattattactgtgccctatatatg
ggcagtggcatttgggtgttcggcggagggacccagctcaccgttttaagtgacgtacgcgagcccaaatcttctgacaaaactcacacatgccca
ccgtgcccagcacctgaactcctgggtggaccgtcagtcttcctcttccccccaaaacccaaggacaccctcatgatctcccggacccctgaggtc
acatgcgtggtggtggacgtgagccacgaagaccctgaggtcaagttcaactggtacgtggacggcgtggaggtgcataatgccaagacaaagc
cgcgggaggagcagtacaacagcacgtaccgtgtggtcagcgtcctcaccgtcctgcaccaggactggctgaatggcaaggagtacaagtgca
aggtctccaacaaagccctcccagcccccatcgagaaaaccatctccaaagccaaagggcagccccgagaaccacaggtgtacaccctgcccc
catcccgggatgagctgaccaagaaccaggtcagcctgacctgcctggtcaaaggcttctatccaagcgacatcgccgtggagtgggagagcaa
tgggcagccggagaacaactacaagaccacgcctcccgtgctggactccgacggctccttcttcctctacagcaagctcaccgtggacaagagca
ggtggcagcaggggaacgtcttctcatgctccgtgatgcatgaggctctgcacaaccactacacgcagaagagcctctccctgtctccgggtaaat
ga (SEQ ID NO: 587)
>Her128_Protein_leader-stop
MEAPAQLLFLLLLWLPDTTGEVQLVQSGAEVKKPGESLKISCKGSGYSFPSYWIGWVRQMP
GKGLEWMGIIYPGDSETRYSPSFQGQVTISADKSISTAYLQWSSLKASDTAMYYCVRHLKPV
AGPAWHDYGMDVWGQGTLVTVSSGGGGSGGGGSGGGGSAQAVVLQEPSISVSPGGTVTLT
CGLTSDSVSTTYYPSWYQQTPGQTPRTLSYSTNTRSSGVPDRFSGSILGNKAALTIAGAQADD
EADYYCALYMGSGIWVFGGGTQLTVLSDVREPKSSDKTHTCPPCPAPELLGGPSVFLFPPKPK
DTLMISRTPEVTCVVVDVSHEDPEVKFNWYVDGVEVHNAKTKPREEQYNSTYRVVSVLTVL
HQDWLNGKEYKCKVSNKALPAPIEKTISKAKGQPREPQVYTLPPSRDELTKNQVSLTCLVKG
FYPSDIAVEWESNGQPENNYKTTPPVLDSDGSFFLYSKLTVDKSRWQQGNVFSCSVMHEALH
NHYTQKSLSLSPGK. (SEQ ID NO: 588)
>Her129_CDS
atggaagcaccagcgcagcttctcttcctcctgctactctggctcccagataccaccggtgaggtccagctggtacagtctggggctgaggtgagg
aagcctggggcctcagtcaaggtctcctgcagggcttctggatacaacttcaaagactactatttgcactgggtgcgccaggcccctggagaaggg
cttgagtggatggggtggatcaaccctcacgctggtaccacaaaatatgcacagaattttcagcacaggattattatgaccagggacacgaccatca
ccacagcctacatggaactgagcagtctgaaatctgacgacacagccatttatttctgtaccagatactactttgacagtagtggttattttaggttcgac
ccctggggccaagggacaatggtcaccgtctcgagtggaggcggcggttcaggcggaggtggctctggcggtggcggaagtgcacagtctgtc
gtgacgcagccgccctcagtgtctggggccccaggacagaaggtcaccatctcctgctctggaagcagctccaacattgggaataattatgtatcct
ggtaccagcagctcccaggaacagcccccaaactcctcatttatgacaataataagcgaccctcagggattcctgaccgattctctggctccaagtct
ggcacgtcagccaccctgggcatcaccggactccagactggggacgaggccgattattactgcggaacatgggatagcagcctgagtgctggg
gtgttcggcggagggaccaaggtcaccgtcctaggtgacgtacgcgagcccaaatcttctgacaaaactcacacatgcccaccgtgcccagcacc
tgaactcctgggtggaccgtcagtcttcctcttccccccaaaacccaaggacaccctcatgatctcccggacccctgaggtcacatgcgtggtggtg
gacgtgagccacgaagaccctgaggtcaagttcaactggtacgtggacggcgtggaggtgcataatgccaagacaaagccgcgggaggagca
gtacaacagcacgtaccgtgtggtcagcgtcctcaccgtcctgcaccaggactggctgaatggcaaggagtacaagtgcaaggtctccaacaaag
ccctcccagcccccatcgagaaaaccatctccaaagccaaagggcagccccgagaaccacaggtgtacaccctgcccccatcccgggatgagc
tgaccaagaaccaggtcagcctgacctgcctggtcaaaggcttctatccaagcgacatcgccgtggagtgggagagcaatgggcagccggaga
acaactacaagaccacgcctcccgtgctggactccgacggctccttcttcctctacagcaagctcaccgtggacaagagcaggtggcagcaggg
gaacgtcttctcatgctccgtgatgcatgaggctctgcacaaccactacacgcagaagagcctctccctgtctccgggtaaatga (SEQ ID NO: 589)
>Her129_Protein_leader-stop
MEAPAQLLFLLLLWLPDTTGEVQLVQSGAEVRKPGASVKVSCRASGYNFKDYYLHWVRQA
PGEGLEWMGWINPHAGTTKYAQNFQHRIIMTRDTTITTAYMELSSLKSDDTAIYFCTRYYFD
SSGYFRFDPWGQGTMVTVSSGGGGSGGGGSGGGGSAQSVVTQPPSVSGAPGQKVTISCSGSS
SNIGNNYVSWYQQLPGTAPKLLIYDNNKRPSGIPDRFSGSKSGTSATLGITGLQTGDEADYYC
GTWDSSLSAGVFGGGTKVTVLGDVREPKSSDKTHTCPPCPAPELLGGPSVFLFPPKPKDTLMI
SRTPEVTCVVVDVSHEDPEVKFNWYVDGVEVHNAKTKPREEQYNSTYRVVSVLTVLHQDW
LNGKEYKCKVSNKALPAPIEKTISKAKGQPREPQVYTLPPSRDELTKNQVSLTCLVKGFYPSD
IAVEWESNGQPENNYKTTPPVLDSDGSFFLYSKLTVDKSRWQQGNVFSCSVMHEALHNHYT
QKSLSLSPGK. (SEQ ID NO: 590)
>Her130_CDS
atggaagcaccagcgcagcttctcttcctcctgctactctggctcccagataccaccggtgaggtgcagctggtgcagtctggggcagagatgaaa
aagcccggggagtctctgaagatatcctgcaagacttctggatacagctttaccggctcctggatcgcctgggtgcgccagatgcccgggaaagg
cctggagtggatggggatcatctatcctggtgactctgacaccagatacagcccgtccttccaaggccaggtcaccatctcagccgacaagtccatc
agcaccgcctacctgcagtggagcagcctgaaggcctcggacaccgccatgtattactgtgcgaggatttatagtgactcgggttacaattggttcg
actcttggggcaggggaaccctggtcaccgtctcgagtggaggcggcggttcaggcggaggtggctctggcggtggcggaagtgcacagactg
tggtgatccaggagccatcgttctcagtgtcccctggagggacagtcacactcacttgtggcttgagctctggctcagtctctaatagtcactacccca
gctggtatcagcagaccccaggccaggctccacgaacgctcatctacagcacaaacactcgctcttctggggtccctgatcgcttctctggctccat
ccttgggaacaaagctgccctcaccatcacgggggcccaggcggatgatgaatctgatttttactgtctgctatatctgggtagtggcatttcggtatt
cggcggagggaccaagctgaccgtcctaggtgacgtacgcgagcccaaatcttctgacaaaactcacacatgcccaccgtgcccagcacctgaa
ctcctgggtggaccgtcagtcttcctcttccccccaaaacccaaggacaccctcatgatctcccggacccctgaggtcacatgcgtggtggtggac
gtgagccacgaagaccctgaggtcaagttcaactggtacgtggacggcgtggaggtgcataatgccaagacaaagccgcgggaggagcagtac
aacagcacgtaccgtgtggtcagcgtcctcaccgtcctgcaccaggactggctgaatggcaaggagtacaagtgcaaggtctccaacaaagccct
cccagcccccatcgagaaaaccatctccaaagccaaagggcagccccgagaaccacaggtgtacaccctgcccccatcccgggatgagctgac
caagaaccaggtcagcctgacctgcctggtcaaaggcttctatccaagcgacatcgccgtggagtgggagagcaatgggcagccggagaacaa
ctacaagaccacgcctcccgtgctggactccgacggctccttcttcctctacagcaagctcaccgtggacaagagcaggtggcagcaggggaac
gtcttctcatgctccgtgatgcatgaggctctgcacaaccactacacgcagaagagcctctccctgtctccgggtaaatga (SEQ ID NO: 591)
>Her130_Protein_leader-stop
MEAPAQLLFLLLLWLPDTTGEVQLVQSGAEMKKPGESLKISCKTSGYSFTGSWIAWVRQMP
GKGLEWMGIIYPGDSDTRYSPSFQGQVTISADKSISTAYLQWSSLKASDTAMYYCARIYSDSG
YNWFDSWGRGTLVTVSSGGGGSGGGGSGGGGSAQTVVIQEPSFSVSPGGTVTLTCGLSSGSV
SNSHYPSWYQQTPGQAPRTLIYSTNTRSSGVPDRFSGSILGNKAALTITGAQADDESDFYCLL
YLGSGISVFGGGTKLTVLGDVREPKSSDKTHTCPPCPAPELLGGPSVFLFPPKPKDTLMISRTP
EVTCVVVDVSHEDPEVKFNWYVDGVEVHNAKTKPREEQYNSTYRVVSVLTVLHQDWLNG
KEYKCKVSNKALPAPIEKTISKAKGQPREPQVYTLPPSRDELTKNQVSLTCLVKGFYPSDIAV
EWESNGQPENNYKTTPPVLDSDGSFFLYSKLTVDKSRWQQGNVFSCSVMHEALHNHYTQKS
LSLSPGK. (SEQ ID NO: 592)
>Her131_CDS
atggaagcaccagcgcagcttctcttcctcctgctactctggctcccagataccaccggtgaagtgcagctggtgcagtctggagcagaggtgaaa
aagcccggggagtctctgaagatctcctgtaagggttctggatacaactttaacactcactggatcgggtgggtgcgccagatgcccgggaaaggc
ctggagtggatggggctcatctaccctgatgactctgacacccgattcagcccgtccttcgaaggccaggtcaccctctcagccgacaggtccatc
agtaccgcctacctgcagtggaccagcctgaaggcctcggacaccgccatgtattactgtgcgagatacaaaaaaagtagtggttattacacagga
tatggtatggacgtctggggccgagggacaatggtcaccgtctcgagtggaggcggcggttcaggcggaggtggctctggcggtggcggaagt
gcacagactgtggtgatccaggagccatcgttctcagtgtcccctggagggacagtcacactcacttgtggcttgagctctggctcagtctctactag
ttactaccccacctggtaccagcagaccccaggccaggctccacgcacgctcatctatagcacaaacagtcgcttttctggggtccctgatcgcttct
ctggctccatccttgggagcaaagctgccctcaccatcacgggggcccaggcagatgatgaatctgattattactgtgtgctatatatgggtagtggc
atttcggtgttcggcggagggaccaagctgaccgtcctaggtgacgtacgcgagcccaaatcttctgacaaaactcacacatgcccaccgtgccca
gcacctgaactcctgggtggaccgtcagtcttcctcttccccccaaaacccaaggacaccctcatgatctcccggacccctgaggtcacatgcgtg
gtggtggacgtgagccacgaagaccctgaggtcaagttcaactggtacgtggacggcgtggaggtgcataatgccaagacaaagccgcgggag
gagcagtacaacagcacgtaccgtgtggtcagcgtcctcaccgtcctgcaccaggactggctgaatggcaaggagtacaagtgcaaggtctccaa
caaagccctcccagcccccatcgagaaaaccatctccaaagccaaagggcagccccgagaaccacaggtgtacaccctgcccccatcccggga
tgagctgaccaagaaccaggtcagcctgacctgcctggtcaaaggcttctatccaagcgacatcgccgtggagtgggagagcaatgggcagccg
gagaacaactacaagaccacgcctcccgtgctggactccgacggctccttcttcctctacagcaagctcaccgtggacaagagcaggtggcagca
ggggaacgtcttctcatgctccgtgatgcatgaggctctgcacaaccactacacgcagaagagcctctccctgtctccg
ggtaaatga (SEQ ID NO: 593)
>Her131_Protein_leader-stop
MEAPAQLLFLLLLWLPDTTGEVQLVQSGAEVKKPGESLKISCKGSGYNFNTHWIGWVRQMP
GKGLEWMGLIYPDDSDTRFSPSFEGQVTLSADRSISTAYLQWTSLKASDTAMYYCARYKKSS
GYYTGYGMDVWGRGTMVTVSSGGGGSGGGGSGGGGSAQTVVIQEPSFSVSPGGTVTLTCG
LSSGSVSTSYYPTWYQQTPGQAPRTLIYSTNSRFSGVPDRFSGSILGSKAALTITGAQADDESD
YYCVLYMGSGISVFGGGTKLTVLGDVREPKSSDKTHTCPPCPAPELLGGPSVFLFPPKPKDTL
MISRTPEVTCVVVDVSHEDPEVKFNWYVDGVEVHNAKTKPREEQYNSTYRVVSVLTVLHQ
DWLNGKEYKCKVSNKALPAPIEKTISKAKGQPREPQVYTLPPSRDELTKNQVSLTCLVKGFY
PSDIAVEWESNGQPENNYKTTPPVLDSDGSFFLYSKLTVDKSRWQQGNVFSCSVMHEALHN
HYTQKSLSLSPGK. (SEQ ID NO: 594)
>Her132_CDS
atggaagcaccagcgcagcttctcttcctcctgctactctggctcccagataccaccggtcaggtgcagctgcaggagtccggcccaggactcgtg
aagcctgcggggactctgtccctcacctgcgctgtctccggtgactccatcagcagcaatcactggtggaattgggtccgccagtccccagggaag
ggactggaatggattggtgaaatctttcatagtgacattcgcatcctcaacccgtccctcaagaggcgcgtctccatgtcagtcgacaggtccaagg
accaattctccctgcaactgacctctgtgaccgccgcggacacggccgtgtattactgtgcgagaggtttccatggtgactccggcagaggacttga
cacctggggcagaggaaccctggtcaccgtctcgagtggaggcggcggttcaggcggaggtggctctggcggtggcggaagtgcactttcttct
gagctgactcaggaccctgctgtgtctgtggccttgggacagacagtcagggtcacatgccaaggagacggcctcagaagttattatgcaagctgg
taccagcagaagccagggcaggcccctgtccttgtcatgtatgggaacaacaaccggccctcagggatcccagaccgattctctggctccagctc
gggaaacacagcttccttgaccatcactggggctcaggcggaagatgaggctgtctattattgtaattcgcgggacagcggtgctaaccatctgga
ggttttcggcggagggaccaaggtcaccgtcctaggtgacgtacgcgagcccaaatcttctgacaaaactcacacatgcccaccgtgcccagcac
ctgaactcctgggtggaccgtcagtcttcctcttccccccaaaacccaaggacaccctcatgatctcccggacccctgaggtcacatgcgtggtggt
ggacgtgagccacgaagaccctgaggtcaagttcaactggtacgtggacggcgtggaggtgcataatgccaagacaaagccgcgggaggagc
agtacaacagcacgtaccgtgtggtcagcgtcctcaccgtcctgcaccaggactggctgaatggcaaggagtacaagtgcaaggtctccaacaaa
gccctcccagcccccatcgagaaaaccatctccaaagccaaagggcagccccgagaaccacaggtgtacaccctgcccccatcccgggatgag
ctgaccaagaaccaggtcagcctgacctgcctggtcaaaggcttctatccaagcgacatcgccgtggagtgggagagcaatgggcagccggag
aacaactacaagaccacgcctcccgtgctggactccgacggctccttcttcctctacagcaagctcaccgtggacaagagcaggtggcagcaggg
gaacgtcttctcatgctccgtgatgcatgaggctctgcacaaccactacacgcagaagagcctctccctgtctccgggtaaatga (SEQ ID NO: 595)
>Her132_Protein_leader-stop
MEAPAQLLFLLLLWLPDTTGQVQLQESGPGLVKPAGTLSLTCAVSGDSISSNHWWNWVRQS
PGKGLEWIGEIFHSDIRILNPSLKRRVSMSVDRSKDQFSLQLTSVTAADTAVYYCARGFHGDS
GRGLDTWGRGTLVTVSSGGGGSGGGGSGGGGSALSSELTQDPAVSVALGQTVRVTCQGDG
LRSYYASWYQQKPGQAPVLVMYGNNNRPSGIPDRFSGSSSGNTASLTITGAQAEDEAVYYC
NSRDSGANHLEVFGGGTKVTVLGDVREPKSSDKTHTCPPCPAPELLGGPSVFLFPPKPKDTL
MISRTPEVTCVVVDVSHEDPEVKFNWYVDGVEVHNAKTKPREEQYNSTYRVVSVLTVLHQ
DWLNGKEYKCKVSNKALPAPIEKTISKAKGQPREPQVYTLPPSRDELTKNQVSLTCLVKGFY
PSDIAVEWESNGQPENNYKTTPPVLDSDGSFFLYSKLTVDKSRWQQGNVFSCSVMHEALHN
HYTQKSLSLSPGK. (SEQ ID NO: 596)
>Her133_CDS
atggaagcaccagcgcagcttctcttcctcctgctactctggctcccagataccaccggtgaggtgcagctggtggagtctgggggaggcttggca
cagcctggggggtccctgagactctcctgtgcagcctctggattaacctttaccacctatgccatgagctgggtccgccaggctccagggaagggg
ctggagtgggtctcaagtattagtggaagtggtcatagcacatattacgcagactccgtgaagggccgcttcaccatctccagagacatttccaaga
acacgttgtatctgcaaatgaacagcctcagagccgaggacacggccgtctattactgtgcgaaagattcgtcggcttttgggtttgtacacggtgctt
ttgatatctggggccagggaaccctggtcaccgtctcgagtggaggcggcggttcaggcggaggtggctctggcggtggcggaagtgcactttct
tctgagctgactcaggaccctgctgcgtctgtggccttgggacagacagtcagcatcacatgccaaggagacagcctcagaaactattgggctagc
tggtaccagcagaagccaggacaggcccctgtacttgtcatctatggtaaaaatacccggccctcagggatcccagaccgattctctggctccacct
caggaaacacagcttccttgaccatcactggggctcaggcggaggatgaggctgactattactgcaactcccgggacagtggtcaccgtcttctttt
cggcggagggaccaagctgaccgtcctaggtgacgtacgcgagcccaaatcttctgacaaaactcacacatgcccaccgtgcccagcacctgaa
ctcctgggtggaccgtcagtcttcctcttccccccaaaacccaaggacaccctcatgatctcccggacccctgaggtcacatgcgtggtggtggac
gtgagccacgaagaccctgaggtcaagttcaactggtacgtggacggcgtggaggtgcataatgccaagacaaagccgcgggaggagcagtac
aacagcacgtaccgtgtggtcagcgtcctcaccgtcctgcaccaggactggctgaatggcaaggagtacaagtgcaaggtctccaacaaagccct
cccagcccccatcgagaaaaccatctccaaagccaaagggcagccccgagaaccacaggtgtacaccctgcccccatcccgggatgagctgac
caagaaccaggtcagcctgacctgcctggtcaaaggcttctatccaagcgacatcgccgtggagtgggagagcaatgggcagccggagaacaa
ctacaagaccacgcctcccgtgctggactccgacggctccttcttcctctacagcaagctcaccgtggacaagagcaggtggcagcaggggaac
gtcttctcatgctccgtgatgcatgaggctctgcacaaccactacacgcagaagagcctctccctgtctccgggtaaatga (SEQ ID NO: 597)
>Her133_Protein_leader-stop
MEAPAQLLFLLLLWLPDTTGEVQLVESGGGLAQPGGSLRLSCAASGLTFTTYAMSWVRQAP
GKGLEWVSSISGSGHSTYYADSVKGRFTISRDISKNTLYLQMNSLRAEDTAVYYCAKDSSAF
GFVHGAFDIWGQGTLVTVSSGGGGSGGGGSGGGGSALSSELTQDPAASVALGQTVSITCQG
DSLRNYWASWYQQKPGQAPVLVIYGKNTRPSGIPDRFSGSTSGNTASLTITGAQAEDEADYY
CNSRDSGHRLLFGGGTKLTVLGDVREPKSSDKTHTCPPCPAPELLGGPSVFLFPPKPKDTLMIS
RTPEVTCVVVDVSHEDPEVKFNWYVDGVEVHNAKTKPREEQYNSTYRVVSVLTVLHQDWL
NGKEYKCKVSNKALPAPIEKTISKAKGQPREPQVYTLPPSRDELTKNQVSLTCLVKGFYPSDI
AVEWESNGQPENNYKTTPPVLDSDGSFFLYSKLTVDKSRWQQGNVFSCSVMHEALHNHYT
QKSLSLSPGK. (SEQ ID NO: 598)
>Her134_CDS
atggaagcaccagcgcagcttctcttcctcctgctactctggctcccagataccaccggtgaggtgcagctggtggagtccggagcagaagtcaaa
aagcccggagagtctctgaagatctcctgtaaggcttctggatacatctttacgaacaattggatcgcctgggtgcggcagcagcccgggaaaggc
ctggagtggatgggaatcatctatcctggtgactctgacaccagatacagcccgtccttccagggccgggtcactttctcagccgacacgtccatca
acaccgcctacctccagtggagtagcctgaaggcctcggacaccgccacttactactgtgcgagagaggcctacaactcatacgagtactacggt
atggacgtctggggccaagggacaatggtcaccgtctcgagtggaggcggcggttcaggcggaggtggctctggcggtggcggaagtgcaca
gactgtggtgctccaggagccagcgttctcagtgtcccctggagggacagtcacactcacctgtggcttgagctctggctcagtctctactagttact
accccagttggtaccagcagaccccaggccagcctccacgcacgctcatctacaacacaaacacccgctcttctggggtctctgatcgcttctctgg
ctccatccttgggaacaaagctgccctcaccatcacgggggcccaggccgaagatgaatctgattattactgtgttctgtatatgggtagtggcatttc
ggtattcggcggggggaccaagctgaccgtcctaggtgacgtacgcgagcccaaatcttctgacaaaactcacacatgcccaccgtgcccagca
cctgaactcctgggtggaccgtcagtcttcctcttccccccaaaacccaaggacaccctcatgatctcccggacccctgaggtcacatgcgtggtgg
tggacgtgagccacgaagaccctgaggtcaagttcaactggtacgtggacggcgtggaggtgcataatgccaagacaaagccgcgggaggagc
agtacaacagcacgtaccgtgtggtcagcgtcctcaccgtcctgcaccaggactggctgaatggcaaggagtacaagtgcaaggtctccaacaaa
gccctcccagcccccatcgagaaaaccatctccaaagccaaagggcagccccgagaaccacaggtgtacaccctgcccccatcccgggatgag
ctgaccaagaaccaggtcagcctgacctgcctggtcaaaggcttctatccaagcgacatcgccgtggagtgggagagcaatgggcagccggag
aacaactacaagaccacgcctcccgtgctggactccgacggctccttcttcctctacagcaagctcaccgtggacaagagcaggtggcagcaggg
gaacgtcttctcatgctccgtgatgcatgaggctctgcacaaccactacacgcagaagagcctctccctgtctccgggtaaatga (SEQ ID NO: 599)
>Her134_Protein_leader-stop
MEAPAQLLFLLLLWLPDTTGEVQLVESGAEVKKPGESLKISCKASGYIFTNNWIAWVRQQPG
KGLEWMGIIYPGDSDTRYSPSFQGRVTFSADTSINTAYLQWSSLKASDTATYYCAREAYNSY
EYYGMDVWGQGTMVTVSSGGGGSGGGGSGGGGSAQTVVLQEPAFSVSPGGTVTLTCGLSS
GSVSTSYYPSWYQQTPGQPPRTLIYNTNTRSSGVSDRFSGSILGNKAALTITGAQAEDESDYY
CVLYMGSGISVFGGGTKLTVLGDVREPKSSDKTHTCPPCPAPELLGGPSVFLFPPKPKDTLMIS
RTPEVTCVVVDVSHEDPEVKFNWYVDGVEVHNAKTKPREEQYNSTYRVVSVLTVLHQDWL
NGKEYKCKVSNKALPAPIEKTISKAKGQPREPQVYTLPPSRDELTKNQVSLTCLVKGFYPSDI
AVEWESNGQPENNYKTTPPVLDSDGSFFLYSKLTVDKSRWQQGNVFSCSVMHEALHNHYT
QKSLSLSPGK. (SEQ ID NO: 600)
>Her135_CDS
atggaagcaccagcgcagcttctcttcctcctgctactctggctcccagataccaccggtgaggtgcagctgttggagtctgggggaggcttggtac
agcctggggggtccctgagactctcctgtgcagcctctggattcacctttagcagctatgccatgagctgggtccgccaggctccagggaagggg
ctggagtgggtctcagctattagtggtagtggtggtagcacatactacgcagactccgtgaagggccggttcaccatctccagagacaattccaaga
acacgctgtatctgcaaatgaacagcctgagagccgaggacacggccgtgtattactgtgcgaaagatttctggtttggactaccaccttccttctttg
actcttggggccaagggacaatggtcaccgtctcgagtggaggcggcggttcaggcggaggtggctctggcggtggcggaagtgcacagtctgt
gctgactcagccaccctcagtgtccgtgtccccaggacagaaggccagcatcacctgctctggagaaagaatgggggataaatatgctgcctggt
atcagcagaagccaggccagtcacctatactggtcatctatcaagatacaaagcggccctcagggatccctgagcgattctctggctccaactctgg
gaacacagccacgttgaccatcagcgggacccaggacatggatgaggctgactattactgtcaggtgtgggacagcagcactggggtattcggc
ggagggaccaaggtcaccgtcctaggtgacgtacgcgagcccaaatcttctgacaaaactcacacatgcccaccgtgcccagcacctgaactcct
gggtggaccgtcagtcttcctcttccccccaaaacccaaggacaccctcatgatctcccggacccctgaggtcacatgcgtggtggtggacgtgag
ccacgaagaccctgaggtcaagttcaactggtacgtggacggcgtggaggtgcataatgccaagacaaagccgcgggaggagcagtacaacag
cacgtaccgtgtggtcagcgtcctcaccgtcctgcaccaggactggctgaatggcaaggagtacaagtgcaaggtctccaacaaagccctcccag
cccccatcgagaaaaccatctccaaagccaaagggcagccccgagaaccacaggtgtacaccctgcccccatcccgggatgagctgaccaaga
accaggtcagcctgacctgcctggtcaaaggcttctatccaagcgacatcgccgtggagtgggagagcaatgggcagccggagaacaactacaa
gaccacgcctcccgtgctggactccgacggctccttcttcctctacagcaagctcaccgtggacaagagcaggtggcagcaggggaacgtcttct
catgctccgtgatgcatgaggctctgcacaaccactacacgcagaagagcctctccctgtctccgggtaaatga (SEQ ID NO: 601)
>Her135_Protein_leader-stop
MEAPAQLLFLLLLWLPDTTGEVQLLESGGGLVQPGGSLRLSCAASGFTFSSYAMSWVRQAP
GKGLEWVSAISGSGGSTYYADSVKGRFTISRDNSKNTLYLQMNSLRAEDTAVYYCAKDFWF
GLPPSFFDSWGQGTMVTVSSGGGGSGGGGSGGGGSAQSVLTQPPSVSVSPGQKASITCSGER
MGDKYAAWYQQKPGQSPILVIYQDTKRPSGIPERFSGSNSGNTATLTISGTQDMDEADYYCQ
VWDSSTGVFGGGTKVTVLGDVREPKSSDKTHTCPPCPAPELLGGPSVFLFPPKPKDTLMISRT
PEVTCVVVDVSHEDPEVKFNWYVDGVEVHNAKTKPREEQYNSTYRVVSVLTVLHQDWLNG
KEYKCKVSNKALPAPIEKTISKAKGQPREPQVYTLPPSRDELTKNQVSLTCLVKGFYPSDIAV
EWESNGQPENNYKTTPPVLDSDGSFFLYSKLTVDKSRWQQGNVFSCSVMHEALHNHYTQKS
LSLSPGK. (SEQ ID NO: 602)
>Her136_CDS
atggaagcaccagcgcagcttctcttcctcctgctactctggctcccagataccaccggtgaggtgcagctgttggagtctgggggaggcttggtac
agcctggggggtccctgagactctcctgtgcagcctctggattcacctttagcagctatgccatgagctgggtccgccaggctccagggaagggg
ctggagtgggtctcagctattagtggtagtggtggtagcacatactacgcagactccgtgaagggccggttcaccatctccagagacaattccaaga
acacgctgtatctgcaaatgaacagcctgagagccgaggacatggccgtgtattactgtgcgaggactcccgggtatagcagtggctggtactcgg
tttggggccggggcaccctggtcaccgtctcgagtggaggcggcggttcaggcggaggtggctctggcggtggcggaagtgcacagtctgtcgt
gacgcagccgccctcagtgtctggggccccagggcagagggtcaccatctcctgtactgggagcagctccaacatcggggcagggtatgatgtt
cactggtaccagcaggttccaggaacagcccccaaactcctcatctatggtaacaacaatcggccctcgggggtccctgaccgattctctggctcc
aagtctggcacctcagcctccctggccatcactgggctccagcctgaggatgaagttgattattactgccagtcctatgaccgcagcctgagtggtta
tatcttcggaagtgggaccaaggtcaccgtcctaggtgacgtacgcgagcccaaatcttctgacaaaactcacacatgcccaccgtgcccagcacc
tgaactcctgggtggaccgtcagtcttcctcttccccccaaaacccaaggacaccctcatgatctcccggacccctgaggtcacatgcgtggtggtg
gacgtgagccacgaagaccctgaggtcaagttcaactggtacgtggacggcgtggaggtgcataatgccaagacaaagccgcgggaggagca
gtacaacagcacgtaccgtgtggtcagcgtcctcaccgtcctgcaccaggactggctgaatggcaaggagtacaagtgcaaggtctccaacaaag
ccctcccagcccccatcgagaaaaccatctccaaagccaaagggcagccccgagaaccacaggtgtacaccctgcccccatcccgggatgagc
tgaccaagaaccaggtcagcctgacctgcctggtcaaaggcttctatccaagcgacatcgccgtggagtgggagagcaatgggcagccggaga
acaactacaagaccacgcctcccgtgctggactccgacggctccttcttcctctacagcaagctcaccgtggacaagagcaggtggcagcaggg
gaacgtcttctcatgctccgtgatgcatgaggctctgcacaaccactacacgcagaagagcctctccctgtctccgggtaaatga (SEQ ID NO: 603)
>Her136_Protein_leader-stop
MEAPAQLLFLLLLWLPDTTGEVQLLESGGGLVQPGGSLRLSCAASGFTFSSYAMSWVRQAP
GKGLEWVSAISGSGGSTYYADSVKGRFTISRDNSKNTLYLQMNSLRAEDMAVYYCARTPGY
SSGWYSVWGRGTLVTVSSGGGGSGGGGSGGGGSAQSVVTQPPSVSGAPGQRVTISCTGSSSN
IGAGYDVHWYQQVPGTAPKLLIYGNNNRPSGVPDRFSGSKSGTSASLAITGLQPEDEVDYYC
QSYDRSLSGYIFGSGTKVTVLGDVREPKSSDKTHTCPPCPAPELLGGPSVFLFPPKPKDTLMIS
RTPEVTCVVVDVSHEDPEVKFNWYVDGVEVHNAKTKPREEQYNSTYRVVSVLTVLHQDWL
NGKEYKCKVSNKALPAPIEKTISKAKGQPREPQVYTLPPSRDELTKNQVSLTCLVKGFYPSDI
AVEWESNGQPENNYKTTPPVLDSDGSFFLYSKLTVDKSRWQQGNVFSCSVMHEALHNHYT
QKSLSLSPGK. (SEQ ID NO: 604)
>Her137_CDS
atggaagcaccagcgcagcttctcttcctcctgctactctggctcccagataccaccggtgaggtgcagctgttggagtctgggggaggcttggtac
agcctggggggtccctgagactctcctgtgcagcctctggattcacctttagcagctatgccatgagctgggtccgccaggctccagggaagggg
ctggagtgggtctcagctattagtggtagtggtggtagcacatactacgcagactccgtgaagggccggttcaccatctccagagacaattccaaga
acacgctgtatctgcaaatgaacagcctgagagccgaggacacggccgtgtattactgtgcgaaagatctgaacccttattcagtggtaactctcgg
tatggacgtctggggcagagggacaatggtcaccgtctcgagtggaggcggcggttcaggcggaggtggctctggcggtggcggaagtgcaca
gtctgtgctgactcagccaccctcggtgtcagtggccccaggacaggcggccaggattccctgtgggggagacaacattggaagtaagagtgttc
actggtaccagcagaggccaggccaggcccctgtcctggtcgtctttgatgatagtgaccggccctcagggatccctgagcgattctctggctcca
attctgggcacacggccaccctgaccatcaacagggtcgaacccggggatgaggccgagtattattgtgaggtgtgggatggtggcgagagaca
tgtggtattcggcggagggaccaagctgaccgtcctaggtgacgtacgcgagcccaaatcttctgacaaaactcacacatgcccaccgtgcccag
cacctgaactcctgggtggaccgtcagtcttcctcttccccccaaaacccaaggacaccctcatgatctcccggacccctgaggtcacatgcgtggt
ggtggacgtgagccacgaagaccctgaggtcaagttcaactggtacgtggacggcgtggaggtgcataatgccaagacaaagccgcgggagg
agcagtacaacagcacgtaccgtgtggtcagcgtcctcaccgtcctgcaccaggactggctgaatggcaaggagtacaagtgcaaggtctccaac
aaagccctcccagcccccatcgagaaaaccatctccaaagccaaagggcagccccgagaaccacaggtgtacaccctgcccccatcccgggat
gagctgaccaagaaccaggtcagcctgacctgcctggtcaaaggcttctatccaagcgacatcgccgtggagtgggagagcaatgggcagccg
gagaacaactacaagaccacgcctcccgtgctggactccgacggctccttcttcctctacagcaagctcaccgtggacaagagcaggtggcagca
ggggaacgtcttctcatgctccgtgatgcatgaggctctgcacaaccactacacgcagaagagcctctccctgtctcc
gggtaaatga (SEQ ID NO: 605)
>Her137_Protein_leader-stop
MEAPAQLLFLLLLWLPDTTGEVQLLESGGGLVQPGGSLRLSCAASGFTFSSYAMSWVRQAP
GKGLEWVSAISGSGGSTYYADSVKGRFTISRDNSKNTLYLQMNSLRAEDTAVYYCAKDLNP
YSVVTLGMDVWGRGTMVTVSSGGGGSGGGGSGGGGSAQSVLTQPPSVSVAPGQAARIPCG
GDNIGSKSVHWYQQRPGQAPVLVVFDDSDRPSGIPERFSGSNSGHTATLTINRVEPGDEAEYY
CEVWDGGERHVVFGGGTKLTVLGDVREPKSSDKTHTCPPCPAPELLGGPSVFLFPPKPKDTL
MISRTPEVTCVVVDVSHEDPEVKFNWYVDGVEVHNAKTKPREEQYNSTYRVVSVLTVLHQ
DWLNGKEYKCKVSNKALPAPIEKTISKAKGQPREPQVYTLPPSRDELTKNQVSLTCLVKGFY
PSDIAVEWESNGQPENNYKTTPPVLDSDGSFFLYSKLTVDKSRWQQGNVFSCSVMHEALHN
HYTQKSLSLSPGK. (SEQ ID NO: 606)
>Her138_CDS
atggaagcaccagcgcagcttctcttcctcctgctactctggctcccagataccaccggtgaggtgcagctgttggagtctgggggaggcttggtac
agcctggggggtccctgagactctcctgtgcagcctctggattcacctttagcagctatgccataagctgggtccgccaggctccagggaaggggc
tggagtgggtctcagctattagtggtagtggtggtagcacatactacgcagactccgtgaagggccggttcaccatctccagagacaattccaagaa
cacgctgtatctgcaaatgaacagcctgagagccgaggacacggccgtgtattactgtgcgagagattcgagtagggtgggagcttatctggtgttt
gactactggggccgggggacaatggtcaccgtctcgagtggaggcggcggttcaggcggaggtggctctggcggtggcggaagtgcacagtct
gtgctgacgcagccgccctcagtgtctggggccccagggcagagggtcaccatctcctgcactgggagcagctccaacatcggggcaggttatg
atgtacactggtaccagcagcttccaggaacagcccccaaactcctcatctatggtaacagcaaacgcccctcaggggtccctgaccgattctctgg
ctccaagtctggcacctcagcctccctggccctcactgggctccaggctgaggatgaggctgattattactgccagtcctatgacagcagcctgagt
ggttatgtcttcggaactgggaccaaggtcaccgtcctaggtgacgtacgcgagcccaaatcttctgacaaaactcacacatgcccaccgtgccca
gcacctgaactcctgggtggaccgtcagtcttcctcttccccccaaaacccaaggacaccctcatgatctcccggacccctgaggtcacatgcgtg
gtggtggacgtgagccacgaagaccctgaggtcaagttcaactggtacgtggacggcgtggaggtgcataatgccaagacaaagccgcgggag
gagcagtacaacagcacgtaccgtgtggtcagcgtcctcaccgtcctgcaccaggactggctgaatggcaaggagtacaagtgcaaggtctccaa
caaagccctcccagcccccatcgagaaaaccatctccaaagccaaagggcagccccgagaaccacaggtgtacaccctgcccccatcccggga
tgagctgaccaagaaccaggtcagcctgacctgcctggtcaaaggcttctatccaagcgacatcgccgtggagtgggagagcaatgggcagccg
gagaacaactacaagaccacgcctcccgtgctggactccgacggctccttcttcctctacagcaagctcaccgtggacaagagcaggtggcagca
ggggaacgtcttctcatgctccgtgatgcatgaggctctgcacaaccactacacgcagaagagcctctccctgtctcc
gggtaaatga (SEQ ID NO: 607)
>Her138_Protein_leader-stop
MEAPAQLLFLLLLWLPDTTGEVQLLESGGGLVQPGGSLRLSCAASGFTFSSYAISWVRQAPG
KGLEWVSAISGSGGSTYYADSVKGRFTISRDNSKNTLYLQMNSLRAEDTAVYYCARDSSRV
GAYLVFDYWGRGTMVTVSSGGGGSGGGGSGGGGSAQSVLTQPPSVSGAPGQRVTISCTGSS
SNIGAGYDVHWYQQLPGTAPKLLIYGNSKRPSGVPDRFSGSKSGTSASLALTGLQAEDEADY
YCQSYDSSLSGYVFGTGTKVTVLGDVREPKSSDKTHTCPPCPAPELLGGPSVFLFPPKPKDTL
MISRTPEVTCVVVDVSHEDPEVKFNWYVDGVEVHNAKTKPREEQYNSTYRVVSVLTVLHQ
DWLNGKEYKCKVSNKALPAPIEKTISKAKGQPREPQVYTLPPSRDELTKNQVSLTCLVKGFY
PSDIAVEWESNGQPENNYKTTPPVLDSDGSFFLYSKLTVDKSRWQQGNVFSCSVMHEALHN
HYTQKSLSLSPGK. (SEQ ID NO: 608)
>Her139_CDS
atggaagcaccagcgcagcttctcttcctcctgctactctggctcccagataccaccggtgaggtgcagctgttggagtctgggggaggcttggtac
agcctggggggtccctgagactctcctgtgcagcctctggattcacctttagcagctatgccatgagctgggtccgccaggctccagggaagggg
ctggagtgggtctcagctattagtggtagtggtggtagcacatactacgcagactccgtgaagggccggttcaccatctccagagacaattccaaga
acacgctgtatctgcaaatgaacggcctgagagtcgaggacacggccgtgtattactgtgcgaaagaattggtcagtagagggagcctcacctttg
actactggggcaaggggacaatggtcaccgtctcgagtggaggcggcggttcaggcggaggtggctctggcggtggcggaagtgcacagtctg
tgttgacgcagccgccctcagtgtctggggccccagggcagggggtcaccatctcctgcactgggagcagctccaacatcggggcagattttgct
gtacactggtaccaacaacttccagggacagcccccaaactcctcatcaatggtagcagccatcggccctcaggggtccctgaccgattctctggc
tccaagtctggcccctcagcctccctggccatcactgggctccaagccgacgatgaggctgattatttttgccagtcctatgactacagactcaatgct
ttagtgttcggcggagggaccaagctgaccgtcctaggtgacgtacgcgagcccaaatcttctgacaaaactcacacatgcccaccgtgcccagc
acctgaactcctgggtggaccgtcagtcttcctcttccccccaaaacccaaggacaccctcatgatctcccggacccctgaggtcacatgcgtggtg
gtggacgtgagccacgaagaccctgaggtcaagttcaactggtacgtggacggcgtggaggtgcataatgccaagacaaagccgcgggagga
gcagtacaacagcacgtaccgtgtggtcagcgtcctcaccgtcctgcaccaggactggctgaatggcaaggagtacaagtgcaaggtctccaaca
aagccctcccagcccccatcgagaaaaccatctccaaagccaaagggcagccccgagaaccacaggtgtacaccctgcccccatcccgggatg
agctgaccaagaaccaggtcagcctgacctgcctggtcaaaggcttctatccaagcgacatcgccgtggagtgggagagcaatgggcagccgg
agaacaactacaagaccacgcctcccgtgctggactccgacggctccttcttcctctacagcaagctcaccgtggacaagagcaggtggcagcag
gggaacgtcttctcatgctccgtgatgcatgaggctctgcacaaccactacacgcagaagagcctctccctgtctcc
gggtaaatga (SEQ ID NO: 609)
>Her139_Protein_leader-stop
MEAPAQLLFLLLLWLPDTTGEVQLLESGGGLVQPGGSLRLSCAASGFTFSSYAMSWVRQAP
GKGLEWVSAISGSGGSTYYADSVKGRFTISRDNSKNTLYLQMNGLRVEDTAVYYCAKELVS
RGSLTFDYWGKGTMVTVSSGGGGSGGGGSGGGGSAQSVLTQPPSVSGAPGQGVTISCTGSSS
NIGADFAVHWYQQLPGTAPKLLINGSSHRPSGVPDRFSGSKSGPSASLAITGLQADDEADYFC
QSYDYRLNALVFGGGTKLTVLGDVREPKSSDKTHTCPPCPAPELLGGPSVFLFPPKPKDTLMI
SRTPEVTCVVVDVSHEDPEVKFNWYVDGVEVHNAKTKPREEQYNSTYRVVSVLTVLHQDW
LNGKEYKCKVSNKALPAPIEKTISKAKGQPREPQVYTLPPSRDELTKNQVSLTCLVKGFYPSD
IAVEWESNGQPENNYKTTPPVLDSDGSFFLYSKLTVDKSRWQQGNVFSCSVMHEALHNHYT
QKSLSLSPGK. (SEQ ID NO: 610)
>Her140_CDS
atggaagcaccagcgcagcttctcttcctcctgctactctggctcccagataccaccggtgaggtgcagctgttggagtctgggggaggcttggtac
agcctggggggtccctgagactctcctgtgcagcctctggattcacctttagcagctatgccatgagctgggtccgccaggctccagggaagggg
ctggagtgggtctcagctattagtggtagtggtggtagcacatactacgcagactccgtgaagggccggttcaccatctccagagacaattccaaga
acacgctgtatctgcaaatgaacagcctgagagccgaggacacggccgtgtattactgtgcgagagatagacggccgagggatgatgcttttgata
tgtgggggagagggaccacggtcaccgtctcgagtggaggcggcggttcaggcggaggtggctctggcggtggcggaagtgcacttaacatcc
agatgacccagtctccctcttctgtgtctgcttctgttggagacagagtcagcatcacttgtcgggcgagtcagggaattggcagctggttattctggta
tcagcagaaaccagggaaagcccctatcctcctgatgtccgctgtgtccggtttgcaaagtggagtcccatcacgattcagcggcagcggatctgg
gacagatttcactctcacgatcagcagcgtacagcctgaggattttgcaacttactattgtcaacaggctcacagtttccctatcaccttcggccaagg
gacacgactggagattaaacgtgacgtacgcgagcccaaatcttctgacaaaactcacacatgcccaccgtgcccagcacctgaactcctgggtg
gaccgtcagtcttcctcttccccccaaaacccaaggacaccctcatgatctcccggacccctgaggtcacatgcgtggtggtggacgtgagccacg
aagaccctgaggtcaagttcaactggtacgtggacggcgtggaggtgcataatgccaagacaaagccgcgggaggagcagtacaacagcacgt
accgtgtggtcagcgtcctcaccgtcctgcaccaggactggctgaatggcaaggagtacaagtgcaaggtctccaacaaagccctcccagccccc
atcgagaaaaccatctccaaagccaaagggcagccccgagaaccacaggtgtacaccctgcccccatcccgggatgagctgaccaagaaccag
gtcagcctgacctgcctggtcaaaggcttctatccaagcgacatcgccgtggagtgggagagcaatgggcagccggagaacaactacaagacca
cgcctcccgtgctggactccgacggctccttcttcctctacagcaagctcaccgtggacaagagcaggtggcagcaggggaacgtcttctcatgct
ccgtgatgcatgaggctctgcacaaccactacacgcagaagagcctctccctgtctccgggtaaatga (SEQ ID NO: 611)
>Her140_Protein_leader-stop
MEAPAQLLFLLLLWLPDTTGEVQLLESGGGLVQPGGSLRLSCAASGFTFSSYAMSWVRQAP
GKGLEWVSAISGSGGSTYYADSVKGRFTISRDNSKNTLYLQMNSLRAEDTAVYYCARDRRP
RDDAFDMWGRGTTVTVSSGGGGSGGGGSGGGGSALNIQMTQSPSSVSASVGDRVSITCRAS
QGIGSWLFWYQQKPGKAPILLMSAVSGLQSGVPSRFSGSGSGTDFTLTISSVQPEDFATYYCQ
QAHSFPITFGQGTRLEIKRDVREPKSSDKTHTCPPCPAPELLGGPSVFLFPPKPKDTLMISRTPE
VTCVVVDVSHEDPEVKFNWYVDGVEVHNAKTKPREEQYNSTYRVVSVLTVLHQDWLNGK
EYKCKVSNKALPAPIEKTISKAKGQPREPQVYTLPPSRDELTKNQVSLTCLVKGFYPSDIAVE
WESNGQPENNYKTTPPVLDSDGSFFLYSKLTVDKSRWQQGNVFSCSVMHEALHNHYTQKSL
SLSPGK. (SEQ ID NO: 612)
>Her141_CDS
atggaagcaccagcgcagcttctcttcctcctgctactctggctcccagataccaccggtgaggtgcagctgttggagtctgggggaggcttggtac
agcctggggggtccctgagactctcctgtgcagcctctggattcacctttagcagctatgccatgagctgggtccgccaggctccagggaagggg
ctggagtgggtctcagctattagtggtagtggtggtagcacatactccgcagactccgtgaagggccggttcaccatctccagagacaactccaag
aacacgctgtatctgcaaatgaacagcctgagagccgaggacacggccgtgtattactgtgcgggaggtagagtgggatctacggcggcttttgat
acatgggggcgagggaccacggtcaccgtctcgagtggaggcggcggttcaggcggaggtggctctggcggtggcggaagtgcacaggctgt
gctgactcagccgtcctcagtgtctggggccccagggcagagggtcaccatctcctgcactgggagcagctccaacatcggggcaggttatgatg
tacactggtaccagcagcttccaggaacagcccccaaactcctcatctatggtaacagcaatcggccctcaggggtccctgaccgattctctggctc
caagtctggcacctcagcctccctggccatcactgggctccaggctgaggatgaggctgattattactgccagtcctatgacagcagcctgcgtggt
tatgtcttcggaactgggaccaagctgaccgtcctaggtgacgtacgcgagcccaaatcttctgacaaaactcacacatgcccaccgtgcccagca
cctgaactcctgggtggaccgtcagtcttcctcttccccccaaaacccaaggacaccctcatgatctcccggacccctgaggtcacatgcgtggtgg
tggacgtgagccacgaagaccctgaggtcaagttcaactggtacgtggacggcgtggaggtgcataatgccaagacaaagccgcgggaggagc
agtacaacagcacgtaccgtgtggtcagcgtcctcaccgtcctgcaccaggactggctgaatggcaaggagtacaagtgcaaggtctccaacaaa
gccctcccagcccccatcgagaaaaccatctccaaagccaaagggcagccccgagaaccacaggtgtacaccctgcccccatcccgggatgag
ctgaccaagaaccaggtcagcctgacctgcctggtcaaaggcttctatccaagcgacatcgccgtggagtgggagagcaatgggcagccggag
aacaactacaagaccacgcctcccgtgctggactccgacggctccttcttcctctacagcaagctcaccgtggacaagagcaggtggcagcaggg
gaacgtcttctcatgctccgtgatgcatgaggctctgcacaaccactacacgcagaagagcctctccctgtctccgggtaaatga (SEQ ID NO: 613)
>Her141_Protein_leader-stop
MEAPAQLLFLLLLWLPDTTGEVQLLESGGGLVQPGGSLRLSCAASGFTFSSYAMSWVRQAP
GKGLEWVSAISGSGGSTYSADSVKGRFTISRDNSKNTLYLQMNSLRAEDTAVYYCAGGRVG
STAAFDTWGRGTTVTVSSGGGGSGGGGSGGGGSAQAVLTQPSSVSGAPGQRVTISCTGSSSN
IGAGYDVHWYQQLPGTAPKLLIYGNSNRPSGVPDRFSGSKSGTSASLAITGLQAEDEADYYC
QSYDSSLRGYVFGTGTKLTVLGDVREPKSSDKTHTCPPCPAPELLGGPSVFLFPPKPKDTLMIS
RTPEVTCVVVDVSHEDPEVKFNWYVDGVEVHNAKTKPREEQYNSTYRVVSVLTVLHQDWL
NGKEYKCKVSNKALPAPIEKTISKAKGQPREPQVYTLPPSRDELTKNQVSLTCLVKGFYPSDI
AVEWESNGQPENNYKTTPPVLDSDGSFFLYSKLTVDKSRWQQGNVFSCSVMHEALHNHYT
QKSLSLSPGK. (SEQ ID NO: 614)
>Her142_CDS
atggaagcaccagcgcagcttctcttcctcctgctactctggctcccagataccaccggtgaggtgcagctgttggagtctgggggaggcttggtac
agcctggggggtccctgagactctcctgtgcagcctctggattcacctttagcagctatgccatgagctgggtccgccaggctccagggaagggg
ctggagtgggtctcagctattagtggtagtggtggtagcacatactacgcagactccgtgaagggccggttcaccatctccagagacaattccaaga
acacgctgtatctgcaaatgaacagcctgagagccgaggacacggccgtgtattactgtgcgagagatcgagccctagtgggagctactcgaactt
ttggctactgggggcaggggaccacggtcaccgtctcgagtggaggcggcggttcaggcggaggtggctctggcggtggcggaagtgcacag
gctgtgctgactcagccgtcctcagtgtctggggccccagggcagagggtcaccatctcctgcactgggagcagctccaacatcggggcaggtta
tgatgtacactggtaccagcagcttccaggaacagcccccaaactcctcatctatggtgacaccaatcggccctcaggggtccctgaccgattctct
ggctccaagtctggcacctcagcctccctggccatcactgggctccaggctgaggatgaggctgattattactgccagtcctttgacagcagcctca
gtggttcggtgttcggcggagggaccaagctgaccgtcctaggtgacgtacgcgagcccaaatcttctgacaaaactcacacatgcccaccgtgc
ccagcacctgaactcctgggtggaccgtcagtcttcctcttccccccaaaacccaaggacaccctcatgatctcccggacccctgaggtcacatgc
gtggtggtggacgtgagccacgaagaccctgaggtcaagttcaactggtacgtggacggcgtggaggtgcataatgccaagacaaagccgcgg
gaggagcagtacaacagcacgtaccgtgtggtcagcgtcctcaccgtcctgcaccaggactggctgaatggcaaggagtacaagtgcaaggtct
ccaacaaagccctcccagcccccatcgagaaaaccatctccaaagccaaagggcagccccgagaaccacaggtgtacaccctgcccccatccc
gggatgagctgaccaagaaccaggtcagcctgacctgcctggtcaaaggcttctatccaagcgacatcgccgtggagtgggagagcaatgggca
gccggagaacaactacaagaccacgcctcccgtgctggactccgacggctccttcttcctctacagcaagctcaccgtggacaagagcaggtggc
agcaggggaacgtcttctcatgctccgtgatgcatgaggctctgcacaaccactacacgcagaagagcctctccctgtctcc
gggtaaatga (SEQ ID NO: 615)
>Her142_Protein_leader-stop
MEAPAQLLFLLLLWLPDTTGEVQLLESGGGLVQPGGSLRLSCAASGFTFSSYAMSWVRQAP
GKGLEWVSAISGSGGSTYYADSVKGRFTISRDNSKNTLYLQMNSLRAEDTAVYYCARDRAL
VGATRTFGYWGQGTTVTVSSGGGGSGGGGSGGGGSAQAVLTQPSSVSGAPGQRVTISCTGS
SSNIGAGYDVHWYQQLPGTAPKLLIYGDTNRPSGVPDRFSGSKSGTSASLAITGLQAEDEAD
YYCQSFDSSLSGSVFGGGTKLTVLGDVREPKSSDKTHTCPPCPAPELLGGPSVFLFPPKPKDTL
MISRTPEVTCVVVDVSHEDPEVKFNWYVDGVEVHNAKTKPREEQYNSTYRVVSVLTVLHQ
DWLNGKEYKCKVSNKALPAPIEKTISKAKGQPREPQVYTLPPSRDELTKNQVSLTCLVKGFY
PSDIAVEWESNGQPENNYKTTPPVLDSDGSFFLYSKLTVDKSRWQQGNVFSCSVMHEALHN
HYTQKSLSLSPGK. (SEQ ID NO: 616)
>Her143_CDS
atggaagcaccagcgcagcttctcttcctcctgctactctggctcccagataccaccggtgaggtgcagctgttggagtctgggggaggcttggtac
agcctggggggtccctgagactctcctgtgcagcctctggattcacctttagcagctatgccatgagctgggtccgccaggctccagggaagggg
ctggagtgggtctcagctattagtggtagtggtggtagcacatactacgcagactccgtgaagggccggttcaccatctccagagacaattccaaga
acacgctgtatctgcaaatgaacagcctgagagccgaggacacggccgtgtattactgtgcgagagttgggtcgtttggtgattacaaagataaaag
tggttacggcttctactttgactactggggccaaggcaccctggtcaccgtctcgagtggaggcggcggttcaggcggaggtggctctggcggtg
gcggaagtgcacagtctgtgctgactcagccaccctcggcgtctgggaccctcgggcagacggtcttcatctcttgttctggaagcagttccaacat
cggaagtaattctgtgagttggtaccagcagctcccaggaacggcccccaaatttctcatttatcataataatcagcggccctcaggggtccctgagc
gattctctggctccaagtctggcacctcagcctccctggccatccgtgggctccagtctgaggatgaggctgattactactgtgcatcttgggaggac
agcctgaatggttgggtgttcggcggggggaccaagctgaccgtcctaggtgacgtacgcgagcccaaatcttctgacaaaactcacacatgccc
accgtgcccagcacctgaactcctgggtggaccgtcagtcttcctcttccccccaaaacccaaggacaccctcatgatctcccggacccctgaggt
cacatgcgtggtggtggacgtgagccacgaagaccctgaggtcaagttcaactggtacgtggacggcgtggaggtgcataatgccaagacaaag
ccgcgggaggagcagtacaacagcacgtaccgtgtggtcagcgtcctcaccgtcctgcaccaggactggctgaatggcaaggagtacaagtgc
aaggtctccaacaaagccctcccagcccccatcgagaaaaccatctccaaagccaaagggcagccccgagaaccacaggtgtacaccctgccc
ccatcccgggatgagctgaccaagaaccaggtcagcctgacctgcctggtcaaaggcttctatccaagcgacatcgccgtggagtgggagagca
atgggcagccggagaacaactacaagaccacgcctcccgtgctggactccgacggctccttcttcctctacagcaagctcaccgtggacaagagc
aggtggcagcaggggaacgtcttctcatgctccgtgatgcatgaggctctgcacaaccactacacgcagaagagcctctccctgtctccgggtaaa
tga (SEQ ID NO: 617)
>Her143_Protein_leader-stop
MEAPAQLLFLLLLWLPDTTGEVQLLESGGGLVQPGGSLRLSCAASGFTFSSYAMSWVRQAP
GKGLEWVSAISGSGGSTYYADSVKGRFTISRDNSKNTLYLQMNSLRAEDTAVYYCARVGSF
GDYKDKSGYGFYFDYWGQGTLVTVSSGGGGSGGGGSGGGGSAQSVLTQPPSASGTLGQTV
FISCSGSSSNIGSNSVSWYQQLPGTAPKFLIYHNNQRPSGVPERFSGSKSGTSASLAIRGLQSED
EADYYCASWEDSLNGWVFGGGTKLTVLGDVREPKSSDKTHTCPPCPAPELLGGPSVFLFPPK
PKDTLMISRTPEVTCVVVDVSHEDPEVKFNWYVDGVEVHNAKTKPREEQYNSTYRVVSVLT
VLHQDWLNGKEYKCKVSNKALPAPIEKTISKAKGQPREPQVYTLPPSRDELTKNQVSLTCLV
KGFYPSDIAVEWESNGQPENNYKTTPPVLDSDGSFFLYSKLTVDKSRWQQGNVFSCSVMHE
ALHNHYTQKSLSLSPGK. (SEQ ID NO: 618)
>Her144_CDS
atggaagcaccagcgcagcttctcttcctcctgctactctggctcccagataccaccggtgaggtgcagctgttggagtctgggggaggcttggtac
agcctggggggtccctgagactctcctgtgcagcctctggattcacctttagcagctatgccatgagctgggtccgccaggctccagggaagggg
ctggagtgggtctcagctattagtggtagtggtggtagcacatactacgcagactccgtgaagggccggttcaccatctccagagacaattccaaga
acacgctgtatctgcaaatgaacagcctgagagccgaggacacggccgtgtattactgtgcgggaggtagagtgggatctacggcggcttttgata
catggggccaggggacaatggtcaccgtctcgagtggaggcggcggttcaggcggaggtggctctggcggtggcggaagtgcacagtctgtgt
taacgcagccgccctcagtgtctggggccccagggcagagggtcgccatatcctgtacggggagcagctccaatattggggcaggttatgatgta
cactggtttcagcaacttccaggaacagcccccaaactcctcatctttggtaacaagaatcggccctcaggggtccccgaccgattctctgcctctaa
gtctggcaccgcagcctccctggccatcactgggctccaggctgaggatgagggtgattattactgccagtcctatgacagcagcctgagtggtgt
gatcttcggcagagggaccaagctgaccgtcctaggtgacgtacgcgagcccaaatcttctgacaaaactcacacatgcccaccgtgcccagcac
ctgaactcctgggtggaccgtcagtcttcctcttccccccaaaacccaaggacaccctcatgatctcccggacccctgaggtcacatgcgtggtggt
ggacgtgagccacgaagaccctgaggtcaagttcaactggtacgtggacggcgtggaggtgcataatgccaagacaaagccgcgggaggagc
agtacaacagcacgtaccgtgtggtcagcgtcctcaccgtcctgcaccaggactggctgaatggcaaggagtacaagtgcaaggtctccaacaaa
gccctcccagcccccatcgagaaaaccatctccaaagccaaagggcagccccgagaaccacaggtgtacaccctgcccccatcccgggatgag
ctgaccaagaaccaggtcagcctgacctgcctggtcaaaggcttctatccaagcgacatcgccgtggagtgggagagcaatgggcagccggag
aacaactacaagaccacgcctcccgtgctggactccgacggctccttcttcctctacagcaagctcaccgtggacaagagcaggtggcagcaggg
gaacgtcttctcatgctccgtgatgcatgaggctctgcacaaccactacacgcagaagagcctctccctgtctccgggtaaatga (SEQ ID NO: 619)
>Her144_Protein_leader-stop
MEAPAQLLFLLLLWLPDTTGEVQLLESGGGLVQPGGSLRLSCAASGFTFSSYAMSWVRQAP
GKGLEWVSAISGSGGSTYYADSVKGRFTISRDNSKNTLYLQMNSLRAEDTAVYYCAGGRVG
STAAFDTWGQGTMVTVSSGGGGSGGGGSGGGGSAQSVLTQPPSVSGAPGQRVAISCTGSSS
NIGAGYDVHWFQQLPGTAPKLLIFGNKNRPSGVPDRFSASKSGTAASLAITGLQAEDEGDYY
CQSYDSSLSGVIFGRGTKLTVLGDVREPKSSDKTHTCPPCPAPELLGGPSVFLFPPKPKDTLMI
SRTPEVTCVVVDVSHEDPEVKFNWYVDGVEVHNAKTKPREEQYNSTYRVVSVLTVLHQDW
LNGKEYKCKVSNKALPAPIEKTISKAKGQPREPQVYTLPPSRDELTKNQVSLTCLVKGFYPSD
IAVEWESNGQPENNYKTTPPVLDSDGSFFLYSKLTVDKSRWQQGNVFSCSVMHEALHNHYT
QKSLSLSPGK. (SEQ ID NO: 620)
>Her145_CDS
atggaagcaccagcgcagcttctcttcctcctgctactctggctcccagataccaccggtgaggtgcagctgttggagtctgggggaggcttggtac
agcctggggggtccctgagactctcctgtgcagcctctggattcacctttagcagctatgccatgagctgggtccgccaggctccagggaagggg
ctggagtgggtctcagctattagtggtagtggtggtagcacatactacgcagactccgtgaagggccggttcaccatctccagagacaattccaaga
acacgctgtatctgcaaatgaacagcctgagagccgaggacacggccgtgtattactgtgcgggagcggcggactacagtaattactttgacttttg
gggccaagggacaatggtcaccgtctcgagtggaggcggcggttcaggcggaggtggctctggcggtggcggaagtgcacagtctgtgctgac
tcagccaccctcagtgtctggggccccagggcagagggtcaccatctcctgcactgggagcagctccaacatcggggcaggttatgatgtacact
ggtaccagcaacttccaggagcagcccccaaactcctcatctatgggaacatcaatcggccctcaggggtccctgaccgattctctggctccaagt
ctggcacctcagcctccctggccatcactgggctccaggctgaggatgagggtgattattactgccagtcctatgacagaagcctgagtgctaagct
gttcggcggagggaccaaggtcaccgtcctaggtgacgtacgcgagcccaaatcttctgacaaaactcacacatgcccaccgtgcccagcacctg
aactcctgggtggaccgtcagtcttcctcttccccccaaaacccaaggacaccctcatgatctcccggacccctgaggtcacatgcgtggtggtgga
cgtgagccacgaagaccctgaggtcaagttcaactggtacgtggacggcgtggaggtgcataatgccaagacaaagccgcgggaggagcagta
caacagcacgtaccgtgtggtcagcgtcctcaccgtcctgcaccaggactggctgaatggcaaggagtacaagtgcaaggtctccaacaaagcc
ctcccagcccccatcgagaaaaccatctccaaagccaaagggcagccccgagaaccacaggtgtacaccctgcccccatcccgggatgagctg
accaagaaccaggtcagcctgacctgcctggtcaaaggcttctatccaagcgacatcgccgtggagtgggagagcaatgggcagccggagaac
aactacaagaccacgcctcccgtgctggactccgacggctccttcttcctctacagcaagctcaccgtggacaagagcaggtggcagcagggga
acgtcttctcatgctccgtgatgcatgaggctctgcacaaccactacacgcagaagagcctctccctgtctccgggtaaatga (SEQ ID NO: 621)
>Her145_Protein_leader-stop
MEAPAQLLFLLLLWLPDTTGEVQLLESGGGLVQPGGSLRLSCAASGFTFSSYAMSWVRQAP
GKGLEWVSAISGSGGSTYYADSVKGRFTISRDNSKNTLYLQMNSLRAEDTAVYYCAGAADY
SNYFDFWGQGTMVTVSSGGGGSGGGGSGGGGSAQSVLTQPPSVSGAPGQRVTISCTGSSSNI
GAGYDVHWYQQLPGAAPKLLIYGNINRPSGVPDRFSGSKSGTSASLAITGLQAEDEGDYYCQ
SYDRSLSAKLFGGGTKVTVLGDVREPKSSDKTHTCPPCPAPELLGGPSVFLFPPKPKDTLMISR
TPEVTCVVVDVSHEDPEVKFNWYVDGVEVHNAKTKPREEQYNSTYRVVSVLTVLHQDWLN
GKEYKCKVSNKALPAPIEKTISKAKGQPREPQVYTLPPSRDELTKNQVSLTCLVKGFYPSDIA
VEWESNGQPENNYKTTPPVLDSDGSFFLYSKLTVDKSRWQQGNVFSCSVMHEALHNHYTQ
KSLSLSPGK. (SEQ ID NO: 622)
>Her146_CDS
atggaagcaccagcgcagcttctcttcctcctgctactctggctcccagataccaccggtgaggtgcagctgttggagtctgggggaggcttggtac
agcctggggggtccctgagactctcctgtgcagcctctggattcacctttagcagctatgccatgagctgggtccgccaggctccagggaagggg
ctggagtgggtctcagctattagtggtagtggtggtagcacatactacgcagactccgtgaagggccggttcaccatctccagagacaattccaaga
acacgctgtatctgcaaatgaacagcctgagagccgaggacacggccgtgtattactgtgcggcgagtaatagttattactactttgactactggggc
cagggaaccctggtcaccgtctcgagtggaggcggcggttcaggcggaggtggctctggcggtggcggaagtgcactttcttctgagctgactca
ggaccctgctgtgtctgtggccttgggacagacagtcaggatcacatgccaaggagacagcctcagaaacttttatccaagttggtatcagcagaa
gccaggacaggcccctgttcttgtcatttatggtaaaaatattcggccctcagggatcccagaccgattctctggctccggctcaggaagcacagctt
ccttgaccatcactggggctcaggcggaagatgaggctgactattactgtaactcccgggacagcagtggtaaacatatgggggtggtattcggcg
gagggaccaagctgaccgtcctaggtgacgtacgcgagcccaaatcttctgacaaaactcacacatgcccaccgtgcccagcacctgaactcctg
ggtggaccgtcagtcttcctcttccccccaaaacccaaggacaccctcatgatctcccggacccctgaggtcacatgcgtggtggtggacgtgagc
cacgaagaccctgaggtcaagttcaactggtacgtggacggcgtggaggtgcataatgccaagacaaagccgcgggaggagcagtacaacagc
acgtaccgtgtggtcagcgtcctcaccgtcctgcaccaggactggctgaatggcaaggagtacaagtgcaaggtctccaacaaagccctcccagc
ccccatcgagaaaaccatctccaaagccaaagggcagccccgagaaccacaggtgtacaccctgcccccatcccgggatgagctgaccaagaa
ccaggtcagcctgacctgcctggtcaaaggcttctatccaagcgacatcgccgtggagtgggagagcaatgggcagccggagaacaactacaag
accacgcctcccgtgctggactccgacggctccttcttcctctacagcaagctcaccgtggacaagagcaggtggcagcaggggaacgtcttctca
tgctccgtgatgcatgaggctctgcacaaccactacacgcagaagagcctctccctgtctccgggtaaatga (SEQ ID NO: 623)
>Her146_Protein_leader-stop
MEAPAQLLFLLLLWLPDTTGEVQLLESGGGLVQPGGSLRLSCAASGFTFSSYAMSWVRQAP
GKGLEWVSAISGSGGSTYYADSVKGRFTISRDNSKNTLYLQMNSLRAEDTAVYYCAASNSY
YYFDYWGQGTLVTVSSGGGGSGGGGSGGGGSALSSELTQDPAVSVALGQTVRITCQGDSLR
NFYPSWYQQKPGQAPVLVIYGKNIRPSGIPDRFSGSGSGSTASLTITGAQAEDEADYYCNSRD
SSGKHMGVVFGGGTKLTVLGDVREPKSSDKTHTCPPCPAPELLGGPSVFLFPPKPKDTLMISR
TPEVTCVVVDVSHEDPEVKFNWYVDGVEVHNAKTKPREEQYNSTYRVVSVLTVLHQDWLN
GKEYKCKVSNKALPAPIEKTISKAKGQPREPQVYTLPPSRDELTKNQVSLTCLVKGFYPSDIA
VEWESNGQPENNYKTTPPVLDSDGSFFLYSKLTVDKSRWQQGNVFSCSVMHEALHNHYTQ
KSLSLSPGK. (SEQ ID NO: 624)
>Her147_CDS
atggaagcaccagcgcagcttctcttcctcctgctactctggctcccagataccaccggtgaggtgcagctgttggagtctgggggaggcttggtac
agcctggggggtccctgagactctcctgtgcagcctctggattcacctttagcagctatgccatgagctgggtccgccaggctccagggaagggg
ctggagtgggtctcagctattagtggtagtggtggtagcacatactacgcagactccgtgaagggccggttcaccatctccagagacaattccaaga
acgcgctgtatctgcaaatgaacagcctgagagccgaggacacggccgtgtattactgtgcgagagatctgggaatagaccccctttggagtggtt
attacacaccccttgactattggggccgggggacaatggtcaccgtctcgagtggaggcggcggttcaggcggaggtggctctggcggtggcgg
aagtgcactttcttctgagctgactcaggaccctgctctgtcggtggccttgggacagacagtcaggatcacatgtcaaggggacagcctcggagg
ctttcatgcaagctggtaccaggagaagccaggacaggcccctgtatttgtcctctatggtaaaaacaaccggccctcagggatcccagaccgattc
tctggctccacctcaggtaacacagctgccctgaccatcactggggctcaggcggaagatgaggctgactattactgtagctcccgggacagaagt
ggtaaccatcgcgtcttcggcggagggaccaagctgaccgtcctaggtgacgtacgcgagcccaaatcttctgacaaaactcacacatgcccacc
gtgcccagcacctgaactcctgggtggaccgtcagtcttcctcttccccccaaaacccaaggacaccctcatgatctcccggacccctgaggtcac
atgcgtggtggtggacgtgagccacgaagaccctgaggtcaagttcaactggtacgtggacggcgtggaggtgcataatgccaagacaaagccg
cgggaggagcagtacaacagcacgtaccgtgtggtcagcgtcctcaccgtcctgcaccaggactggctgaatggcaaggagtacaagtgcaag
gtctccaacaaagccctcccagcccccatcgagaaaaccatctccaaagccaaagggcagccccgagaaccacaggtgtacaccctgcccccat
cccgggatgagctgaccaagaaccaggtcagcctgacctgcctggtcaaaggcttctatccaagcgacatcgccgtggagtgggagagcaatgg
gcagccggagaacaactacaagaccacgcctcccgtgctggactccgacggctccttcttcctctacagcaagctcaccgtggacaagagcaggt
ggcagcaggggaacgtcttctcatgctccgtgatgcatgaggctctgcacaaccactacacgcagaagagcctctccctgtctcc
gggtaaatga (SEQ ID NO: 625)
>Her147_Protein_leader-stop
MEAPAQLLFLLLLWLPDTTGEVQLLESGGGLVQPGGSLRLSCAASGFTFSSYAMSWVRQAP
GKGLEWVSAISGSGGSTYYADSVKGRFTISRDNSKNALYLQMNSLRAEDTAVYYCARDLGI
DPLWSGYYTPLDYWGRGTMVTVSSGGGGSGGGGSGGGGSALSSELTQDPALSVALGQTVRI
TCQGDSLGGFHASWYQEKPGQAPVFVLYGKNNRPSGIPDRFSGSTSGNTAALTITGAQAEDE
ADYYCSSRDRSGNHRVFGGGTKLTVLGDVREPKSSDKTHTCPPCPAPELLGGPSVFLFPPKPK
DTLMISRTPEVTCVVVDVSHEDPEVKFNWYVDGVEVHNAKTKPREEQYNSTYRVVSVLTVL
HQDWLNGKEYKCKVSNKALPAPIEKTISKAKGQPREPQVYTLPPSRDELTKNQVSLTCLVKG
FYPSDIAVEWESNGQPENNYKTTPPVLDSDGSFFLYSKLTVDKSRWQQGNVFSCSVMHEALH
NHYTQKSLSLSPGK. (SEQ ID NO: 626)
>Her148_CDS
atggaagcaccagcgcagcttctcttcctcctgctactctggctcccagataccaccggtgaggtgcagctgttggagtctgggggaggcttggtac
agcctggggggtccctgagactctcctgtgcagcctctggattcacctttagcagctatgccatgagctgggtccgccaggctccagggaagggg
ctggagtgggtctcagctattagtggtagtggtggtagcacatactacgcagactccgtgaagggccggttcaccatctccagagacaattccaaga
acacgctgtatctgcaaatgaacagcctgagagccgaggacacggccgtgtattactgtgcgaggggctacagtggaagttcctttgacgcctggg
gccaagggacaatggtcaccgtctcgagtggaggcggcggttcaggcggaggtggctctggcggtggcggaagtgcacagtctgtgttgacgc
agccgccatcagcgtccgggacccccgggcagagggtcaccatctcttgttctggaagcagctccaatatcggaagtaagtctgtatactggtacc
agcaactcccaggagcggcccccaaactcctcatctacaggaatagtcagcggccctcaggggtccctgaccgattctctgcctccaagtctggca
cctctgcctccctggccatcagtgggctccggtccgaggatgaggctgactattactgtgcagcatgggatggcagcctgagtggacatttcttcgg
aactgggaccaagctgaccgtcctaggtgacgtacgcgagcccaaatcttctgacaaaactcacacatgcccaccgtgcccagcacctgaactcct
gggtggaccgtcagtcttcctcttccccccaaaacccaaggacaccctcatgatctcccggacccctgaggtcacatgcgtggtggtggacgtgag
ccacgaagaccctgaggtcaagttcaactggtacgtggacggcgtggaggtgcataatgccaagacaaagccgcgggaggagcagtacaacag
cacgtaccgtgtggtcagcgtcctcaccgtcctgcaccaggactggctgaatggcaaggagtacaagtgcaaggtctccaacaaagccctcccag
cccccatcgagaaaaccatctccaaagccaaagggcagccccgagaaccacaggtgtacaccctgcccccatcccgggatgagctgaccaaga
accaggtcagcctgacctgcctggtcaaaggcttctatccaagcgacatcgccgtggagtgggagagcaatgggcagccggagaacaactacaa
gaccacgcctcccgtgctggactccgacggctccttcttcctctacagcaagctcaccgtggacaagagcaggtggcagcaggggaacgtcttct
catgctccgtgatgcatgaggctctgcacaaccactacacgcagaagagcctctccctgtctccgggtaaatga (SEQ ID NO: 627)
>Her148_Protein_leader-stop
MEAPAQLLFLLLLWLPDTTGEVQLLESGGGLVQPGGSLRLSCAASGFTFSSYAMSWVRQAP
GKGLEWVSAISGSGGSTYYADSVKGRFTISRDNSKNTLYLQMNSLRAEDTAVYYCARGYSG
SSFDAWGQGTMVTVSSGGGGSGGGGSGGGGSAQSVLTQPPSASGTPGQRVTISCSGSSSNIGS
KSVYWYQQLPGAAPKLLIYRNSQRPSGVPDRFSASKSGTSASLAISGLRSEDEADYYCAAWD
GSLSGHFFGTGTKLTVLGDVREPKSSDKTHTCPPCPAPELLGGPSVFLFPPKPKDTLMISRTPE
VTCVVVDVSHEDPEVKFNWYVDGVEVHNAKTKPREEQYNSTYRVVSVLTVLHQDWLNGK
EYKCKVSNKALPAPIEKTISKAKGQPREPQVYTLPPSRDELTKNQVSLTCLVKGFYPSDIAVE
WESNGQPENNYKTTPPVLDSDGSFFLYSKLTVDKSRWQQGNVFSCSVMHEALHNHYTQKSL
SLSPGK. (SEQ ID NO: 628)
>Her149_CDS
atggaagcaccagcgcagcttctcttcctcctgctactctggctcccagataccaccggtgaggtgcagctgttggagtctgggggaggcttggtac
agcctggggggtccctgagactctcctgtgcagcctctggattcacctttagcagctatgccatgagctgggtccgccaggctccagggaagggg
ctggagtgggtctcagctattagtggtagtggtggtagcacatactacgcagactccgtgaagggccggttcaccatctccagagacaattccaaga
acacgctgtatctgcaaatgaacagcctgagagccgaggacacggccgtgtattactgtgggagaggcagcagagtggggacgatttggggaag
ccttgacttttggggccaagggacaatggtcaccgtctcgagtggaggcggcggttcaggcggaggtggctctggcggtggcggaagtgcacag
tctgtgctgacgcagccgccctcagtgtctgcggccccgggacagagggtcaccatctcctgctctggaaagagctccaacattggcggtaattct
gtggcctggtaccagcaactcccgggaacagcccccaaagtcctcatttatgacaatgataagcgaccctcaggggttcctgaccgattctctggct
ccaagtctggcacgtcagccaccctgggcatcaccggactgcagactggggacgaggccgattattactgcggatcctgggatagcagcctggg
tgttgggatgttcggcggagggaccaaggtcaccgtcctaggtgacgtacgcgagcccaaatcttctgacaaaactcacacatgcccaccgtgcc
cagcacctgaactcctgggtggaccgtcagtcttcctcttccccccaaaacccaaggacaccctcatgatctcccggacccctgaggtcacatgcgt
ggtggtggacgtgagccacgaagaccctgaggtcaagttcaactggtacgtggacggcgtggaggtgcataatgccaagacaaagccgcggga
ggagcagtacaacagcacgtaccgtgtggtcagcgtcctcaccgtcctgcaccaggactggctgaatggcaaggagtacaagtgcaaggtctcc
aacaaagccctcccagcccccatcgagaaaaccatctccaaagccaaagggcagccccgagaaccacaggtgtacaccctgcccccatcccgg
gatgagctgaccaagaaccaggtcagcctgacctgcctggtcaaaggcttctatccaagcgacatcgccgtggagtgggagagcaatgggcagc
cggagaacaactacaagaccacgcctcccgtgctggactccgacggctccttcttcctctacagcaagctcaccgtggacaagagcaggtggcag
caggggaacgtcttctcatgctccgtgatgcatgaggctctgcacaaccactacacgcagaagagcctctccctgtctcc
gggtaaatga (SEQ ID NO: 629)
>Her149_Protein_leader-stop
MEAPAQLLFLLLLWLPDTTGEVQLLESGGGLVQPGGSLRLSCAASGFTFSSYAMSWVRQAP
GKGLEWVSAISGSGGSTYYADSVKGRFTISRDNSKNTLYLQMNSLRAEDTAVYYCGRGSRV
GTIWGSLDFWGQGTMVTVSSGGGGSGGGGSGGGGSAQSVLTQPPSVSAAPGQRVTISCSGK
SSNIGGNSVAWYQQLPGTAPKVLIYDNDKRPSGVPDRFSGSKSGTSATLGITGLQTGDEADY
YCGSWDSSLGVGMFGGGTKVTVLGDVREPKSSDKTHTCPPCPAPELLGGPSVFLFPPKPKDT
LMISRTPEVTCVVVDVSHEDPEVKFNWYVDGVEVHNAKTKPREEQYNSTYRVVSVLTVLHQ
DWLNGKEYKCKVSNKALPAPIEKTISKAKGQPREPQVYTLPPSRDELTKNQVSLTCLVKGFY
PSDIAVEWESNGQPENNYKTTPPVLDSDGSFFLYSKLTVDKSRWQQGNVFSCSVMHEALHN
HYTQKSLSLSPGK. (SEQ ID NO: 630)
>Her150_CDS
atggaagcaccagcgcagcttctcttcctcctgctactctggctcccagataccaccggtgaggtgcagctgttggagtctgggggaggcttggtac
agcctggggggtccctgagactctcctgtgcagcctctggattcacctttagcagctatgccatgagctgggtccgccaggctccagggaagggg
ctggagtgggtctcagctattagtggtagtggtggtagcacatactacgcagactccgtgaagggccggttcaccatctccagagacaattccaaga
acacgctgtatctgcaaatgaacagcctgagagccgaggacacggccgtgtattactgtgcgagagatcgcgtttacgatttttggagtggttattata
cgaggtacaactggttcgacccctgggggcgagggaccacggtcaccgtctcgagtggaggcggcggttcaggcggaggtggctctggcggt
ggcggaagtgcacaggctgtgctgactcagccgtcctcagcgtctgggacccccgggcagagggtcaccatctcttgttctggaagcagctccaa
catcggaagtaattatgtatactggtaccagcagctcccaggaacggcccccaaactcctcatctataggaataatcagcggccctcaggggtccct
gaccgattctctggctccaagtctggcacctcagcctccctggccatcagtgggctccggtccgaggatgaggctgattattactgtgcagcatggg
atgacagcctgagtagtccggtgttcggcggagggaccaaggtcaccgtcctaggtgacgtacgcgagcccaaatcttctgacaaaactcacaca
tgcccaccgtgcccagcacctgaactcctgggtggaccgtcagtcttcctcttccccccaaaacccaaggacaccctcatgatctcccggacccct
gaggtcacatgcgtggtggtggacgtgagccacgaagaccctgaggtcaagttcaactggtacgtggacggcgtggaggtgcataatgccaaga
caaagccgcgggaggagcagtacaacagcacgtaccgtgtggtcagcgtcctcaccgtcctgcaccaggactggctgaatggcaaggagtaca
agtgcaaggtctccaacaaagccctcccagcccccatcgagaaaaccatctccaaagccaaagggcagccccgagaaccacaggtgtacaccc
tgcccccatcccgggatgagctgaccaagaaccaggtcagcctgacctgcctggtcaaaggcttctatccaagcgacatcgccgtggagtggga
gagcaatgggcagccggagaacaactacaagaccacgcctcccgtgctggactccgacggctccttcttcctctacagcaagctcaccgtggaca
agagcaggtggcagcaggggaacgtcttctcatgctccgtgatgcatgaggctctgcacaaccactacacgcagaagagcctctccctgtctccg
ggtaaatga (SEQ ID NO: 631)
>Her150_Protein_leader-stop
MEAPAQLLFLLLLWLPDTTGEVQLLESGGGLVQPGGSLRLSCAASGFTFSSYAMSWVRQAP
GKGLEWVSAISGSGGSTYYADSVKGRFTISRDNSKNTLYLQMNSLRAEDTAVYYCARDRVY
DFWSGYYTRYNWFDPWGRGTTVTVSSGGGGSGGGGSGGGGSAQAVLTQPSSASGTPGQRV
TISCSGSSSNIGSNYVYWYQQLPGTAPKLLIYRNNQRPSGVPDRFSGSKSGTSASLAISGLRSE
DEADYYCAAWDDSLSSPVFGGGTKVTVLGDVREPKSSDKTHTCPPCPAPELLGGPSVFLFPP
KPKDTLMISRTPEVTCVVVDVSHEDPEVKFNWYVDGVEVHNAKTKPREEQYNSTYRVVSVL
TVLHQDWLNGKEYKCKVSNKALPAPIEKTISKAKGQPREPQVYTLPPSRDELTKNQVSLTCL
VKGFYPSDIAVEWESNGQPENNYKTTPPVLDSDGSFFLYSKLTVDKSRWQQGNVFSCSVMH
EALHNHYTQKSLSLSPGK. (SEQ ID NO: 632)
>Her151_CDS
atggaagcaccagcgcagcttctcttcctcctgctactctggctcccagataccaccggtgaggtgcagctgttggagtctgggggaggcttggtac
agcctggggggtccctgagactctcctgtgcagcctctggattcacctttagcagctatgccatgagctgggtccgccagactccagggaaggggc
tggagtgggtctcagctattagtggtagtggtggtagcacatactacgcaaactccgtgaagggccggttcaccatctccagagacaattccaagaa
cacgctgtatctgcaaatgaacagcctgagagccgaggacacggccgtgtattactgtgcgcgggggggaggctacaacccttttgactcctggg
gccaggggacaatggtcaccgtctcgagtggaggcggcggttcaggcggaggtggctctggcggtggcggaagtgcacagtctgccctgactc
agcctgcctccgtgtctgggtctcctggacagtcgatcaccatctcctgcactggaaccggcagtgacgttggtggttataactatgtctcctggtacc
aacagcacccaggcaaagcccccaaactcatgatttatgaggtcattaatcggccctcagggatttctaatcgcttctctggctccaagtctggcaac
acggcctccctgaccatctctgggctccaggctgaggacgaggctgattattactgcggctcatattcaagcagcagcactcttgtattcggcggag
ggaccaagctgaccgtcctaggtgacgtacgcgagcccaaatcttctgacaaaactcacacatgcccaccgtgcccagcacctgaactcctgggt
ggaccgtcagtcttcctcttccccccaaaacccaaggacaccctcatgatctcccggacccctgaggtcacatgcgtggtggtggacgtgagccac
gaagaccctgaggtcaagttcaactggtacgtggacggcgtggaggtgcataatgccaagacaaagccgcgggaggagcagtacaacagcac
gtaccgtgtggtcagcgtcctcaccgtcctgcaccaggactggctgaatggcaaggagtacaagtgcaaggtctccaacaaagccctcccagccc
ccatcgagaaaaccatctccaaagccaaagggcagccccgagaaccacaggtgtacaccctgcccccatcccgggatgagctgaccaagaacc
aggtcagcctgacctgcctggtcaaaggcttctatccaagcgacatcgccgtggagtgggagagcaatgggcagccggagaacaactacaagac
cacgcctcccgtgctggactccgacggctccttcttcctctacagcaagctcaccgtggacaagagcaggtggcagcaggggaacgtcttctcatg
ctccgtgatgcatgaggctctgcacaaccactacacgcagaagagcctctccctgtctccgggtaaatga (SEQ ID NO: 633)
>Her151_Protein_leader-stop
MEAPAQLLFLLLLWLPDTTGEVQLLESGGGLVQPGGSLRLSCAASGFTFSSYAMSWVRQTPG
KGLEWVSAISGSGGSTYYANSVKGRFTISRDNSKNTLYLQMNSLRAEDTAVYYCARGGGYN
PFDSWGQGTMVTVSSGGGGSGGGGSGGGGSAQSALTQPASVSGSPGQSITISCTGTGSDVGG
YNYVSWYQQHPGKAPKLMIYEVINRPSGISNRFSGSKSGNTASLTISGLQAEDEADYYCGSYS
SSSTLVFGGGTKLTVLGDVREPKSSDKTHTCPPCPAPELLGGPSVFLFPPKPKDTLMISRTPEV
TCVVVDVSHEDPEVKFNWYVDGVEVHNAKTKPREEQYNSTYRVVSVLTVLHQDWLNGKE
YKCKVSNKALPAPIEKTISKAKGQPREPQVYTLPPSRDELTKNQVSLTCLVKGFYPSDIAVEW
ESNGQPENNYKTTPPVLDSDGSFFLYSKLTVDKSRWQQGNVFSCSVMHEALHNHYTQKSLS
LSPGK. (SEQ ID NO: 634)
>Her152_CDS
atggaagcaccagcgcagcttctcttcctcctgctactctggctcccagataccaccggtgaggtgcagctgttggagtctgggggaggcttggtac
agcctggggggtccctgagactctcctgtgcagcctctggattcacctttagcagctatgccatgagctgggtccgccaggctccagggaagggg
ctggagtgggtctcagctattagtggtagtggtggtagcacatactacgcagactccgtgaagggccggttcaccatctccagagacaattccaaga
acacgctgtatctgcaaatgaacagcctgagagccgaggacacggccgtgtattactgtgcgagaggtcacaaaatgggatactttgactactggg
gccggggcaccctggtcaccgtctcgagtggaggcggcggttcaggcggaggtggctctggcggtggcggaagtgcactttcttctgagctgact
caggaccctgctgtgtccgtggccttgggacagtcagtcaccatcacgtgtcggggagccagcctcagcaactattatgcaagctggtaccagcag
aggccaggacaagcccctctacttgtcgtctctgataacaacatccggccctcagggatcccagaccgattctctggctccaggtcaggaaccaca
gcttccttgagcatcactggggctcaggcggaagatgaggctgactattactgtcactcccgtgccagcagtgacacccatgtccgggtgtttggcg
gcgggaccaagctgaccgtcctaggtgacgtacgcgagcccaaatcttctgacaaaactcacacatgcccaccgtgcccagcacctgaactcctg
ggtggaccgtcagtcttcctcttccccccaaaacccaaggacaccctcatgatctcccggacccctgaggtcacatgcgtggtggtggacgtgagc
cacgaagaccctgaggtcaagttcaactggtacgtggacggcgtggaggtgcataatgccaagacaaagccgcgggaggagcagtacaacagc
acgtaccgtgtggtcagcgtcctcaccgtcctgcaccaggactggctgaatggcaaggagtacaagtgcaaggtctccaacaaagccctcccagc
ccccatcgagaaaaccatctccaaagccaaagggcagccccgagaaccacaggtgtacaccctgcccccatcccgggatgagctgaccaagaa
ccaggtcagcctgacctgcctggtcaaaggcttctatccaagcgacatcgccgtggagtgggagagcaatgggcagccggagaacaactacaag
accacgcctcccgtgctggactccgacggctccttcttcctctacagcaagctcaccgtggacaagagcaggtggcagcaggggaacgtcttctca
tgctccgtgatgcatgaggctctgcacaaccactacacgcagaagagcctctccctgtctccgggtaaatga (SEQ ID NO: 635)
>Her152_Protein_leader-stop
MEAPAQLLFLLLLWLPDTTGEVQLLESGGGLVQPGGSLRLSCAASGFTFSSYAMSWVRQAP
GKGLEWVSAISGSGGSTYYADSVKGRFTISRDNSKNTLYLQMNSLRAEDTAVYYCARGHKM
GYFDYWGRGTLVTVSSGGGGSGGGGSGGGGSALSSELTQDPAVSVALGQSVTITCRGASLS
NYYASWYQQRPGQAPLLVVSDNNIRPSGIPDRFSGSRSGTTASLSITGAQAEDEADYYCHSRA
SSDTHVRVFGGGTKLTVLGDVREPKSSDKTHTCPPCPAPELLGGPSVFLFPPKPKDTLMISRTP
EVTCVVVDVSHEDPEVKFNWYVDGVEVHNAKTKPREEQYNSTYRVVSVLTVLHQDWLNG
KEYKCKVSNKALPAPIEKTISKAKGQPREPQVYTLPPSRDELTKNQVSLTCLVKGFYPSDIAV
EWESNGQPENNYKTTPPVLDSDGSFFLYSKLTVDKSRWQQGNVFSCSVMHEALHNHYTQKS
LSLSPGK. (SEQ ID NO: 636)
>Her153_CDS
atggaagcaccagcgcagcttctcttcctcctgctactctggctcccagataccaccggtgaggtgcagctgttggagtctgggggaggcttggtac
agcctggggggtccctgagactctcctgtgcagcctctggattcacctttagcagctatgccatgagctgggtccgccaggctccagggaagggg
ctggagtgggtctcagctattagtggtagtggtggtagcacatactacgcagactccgtgaagggccggttcaccatctccagagacaattccaaga
acacgctgtatctgcaaatgaacagcctgagagccgaggacacggccgtgtattactgtgcgagggacagggtctctaactggaactactacggc
caggacagctactttgactactggggccaggggacaatggtcaccgtctcgagtggaggcggcggttcaggcggaggtggctctggcggtggc
ggaagtgcacagtctgtgctgactcagccaccctccgcgtctggggcccccgggcagagggtcaccatttcttgttctgggaccaactccaacatc
ggaagtaataatgtaaactggtatcagcaactcccaggaaaggcccccagactcctcatctacaataataatcagaggccctcaggggtccctgac
cgattctctggctccaagtctggcacctcagcctccctggccatcagtgggctccagtctgagcttgaggctgattattattgttcagcatgggatgac
agcctgcatggtccggtgttcggcggagggaccaagctgaccgtcctaggtgacgtacgcgagcccaaatcttctgacaaaactcacacatgccc
accgtgcccagcacctgaactcctgggtggaccgtcagtcttcctcttccccccaaaacccaaggacaccctcatgatctcccggacccctgaggt
cacatgcgtggtggtggacgtgagccacgaagaccctgaggtcaagttcaactggtacgtggacggcgtggaggtgcataatgccaagacaaag
ccgcgggaggagcagtacaacagcacgtaccgtgtggtcagcgtcctcaccgtcctgcaccaggactggctgaatggcaaggagtacaagtgc
aaggtctccaacaaagccctcccagcccccatcgagaaaaccatctccaaagccaaagggcagccccgagaaccacaggtgtacaccctgccc
ccatcccgggatgagctgaccaagaaccaggtcagcctgacctgcctggtcaaaggcttctatccaagcgacatcgccgtggagtgggagagca
atgggcagccggagaacaactacaagaccacgcctcccgtgctggactccgacggctccttcttcctctacagcaagctcaccgtggacaagagc
aggtggcagcaggggaacgtcttctcatgctccgtgatgcatgaggctctgcacaaccactacacgcagaagagcctctccctgtctccgggtaaa
tga (SEQ ID NO: 637)
>Her153_Protein_leader-stop
MEAPAQLLFLLLLWLPDTTGEVQLLESGGGLVQPGGSLRLSCAASGFTFSSYAMSWVRQAP
GKGLEWVSAISGSGGSTYYADSVKGRFTISRDNSKNTLYLQMNSLRAEDTAVYYCARDRVS
NWNYYGQDSYFDYWGQGTMVTVSSGGGGSGGGGSGGGGSAQSVLTQPPSASGAPGQRVTI
SCSGTNSNIGSNNVNWYQQLPGKAPRLLIYNNNQRPSGVPDRFSGSKSGTSASLAISGLQSEL
EADYYCSAWDDSLHGPVFGGGTKLTVLGDVREPKSSDKTHTCPPCPAPELLGGPSVFLFPPK
PKDTLMISRTPEVTCVVVDVSHEDPEVKFNWYVDGVEVHNAKTKPREEQYNSTYRVVSVLT
VLHQDWLNGKEYKCKVSNKALPAPIEKTISKAKGQPREPQVYTLPPSRDELTKNQVSLTCLV
KGFYPSDIAVEWESNGQPENNYKTTPPVLDSDGSFFLYSKLTVDKSRWQQGNVFSCSVMHE
ALHNHYTQKSLSLSPGK. (SEQ ID NO: 638)
>Her154_CDS
atggaagcaccagcgcagcttctcttcctcctgctactctggctcccagataccaccggtgaggtgcagctgttggagtctgggggaggcttggtac
agcctggggggtccctgagactctcctgtgcagcctctggattcacctttagcagctatgccatgagctgggtccgccaggctccagggaagggg
ctggagtgggtctcagctattagtggtagtggtggtagcacatactacgcagactccgtgaagggccggttcaccatctccagagacaattccaaga
acacgctgtatctgcaaatgaacagcctgagagccgaggacacggccgtgtattactgtgcgagggacagggtctctaactggaactactacggc
caggacagctactttggctactggggccaggggacaatggtcaccgtctcgagtggaggcggcggttcaggcggaggtggctctggcggtggc
ggaagtgcactttcctatgagctgactcagccaccctcagcgtctgggacccccgggcagagggtcaccatctcttgttctggaagcagctccaac
atcggaagtaatactgtaacctggtaccagcagctcccaggaacggccccccaactcctcttccataataatgaccagcggccctcaggggtccct
gaccgattctctggctccaagtctggcacctcaggctccctggccatcagtgggctgcagtctgaggatgaggctgattattactgttcagcatggga
tgacggcctgaatgctgtaatattcggcggagggaccaagctgaccgtcctaggtgacgtacgcgagcccaaatcttctgacaaaactcacacatg
cccaccgtgcccagcacctgaactcctgggtggaccgtcagtcttcctcttccccccaaaacccaaggacaccctcatgatctcccggacccctga
ggtcacatgcgtggtggtggacgtgagccacgaagaccctgaggtcaagttcaactggtacgtggacggcgtggaggtgcataatgccaagaca
aagccgcgggaggagcagtacaacagcacgtaccgtgtggtcagcgtcctcaccgtcctgcaccaggactggctgaatggcaaggagtacaag
tgcaaggtctccaacaaagccctcccagcccccatcgagaaaaccatctccaaagccaaagggcagccccgagaaccacaggtgtacaccctg
cccccatcccgggatgagctgaccaagaaccaggtcagcctgacctgcctggtcaaaggcttctatccaagcgacatcgccgtggagtgggaga
gcaatgggcagccggagaacaactacaagaccacgcctcccgtgctggactccgacggctccttcttcctctacagcaagctcaccgtggacaag
agcaggtggcagcaggggaacgtcttctcatgctccgtgatgcatgaggctctgcacaaccactacacgcagaagagcctctccctgtctccgggt
aaatga (SEQ ID NO: 639)
>Her154_Protein_leader-stop
MEAPAQLLFLLLLWLPDTTGEVQLLESGGGLVQPGGSLRLSCAASGFTFSSYAMSWVRQAP
GKGLEWVSAISGSGGSTYYADSVKGRFTISRDNSKNTLYLQMNSLRAEDTAVYYCARDRVS
NWNYYGQDSYFGYWGQGTMVTVSSGGGGSGGGGSGGGGSALSYELTQPPSASGTPGQRVT
ISCSGSSSNIGSNTVTWYQQLPGTAPQLLFHNNDQRPSGVPDRFSGSKSGTSGSLAISGLQSED
EADYYCSAWDDGLNAVIFGGGTKLTVLGDVREPKSSDKTHTCPPCPAPELLGGPSVFLFPPKP
KDTLMISRTPEVTCVVVDVSHEDPEVKFNWYVDGVEVHNAKTKPREEQYNSTYRVVSVLTV
LHQDWLNGKEYKCKVSNKALPAPIEKTISKAKGQPREPQVYTLPPSRDELTKNQVSLTCLVK
GFYPSDIAVEWESNGQPENNYKTTPPVLDSDGSFFLYSKLTVDKSRWQQGNVFSCSVMHEAL
HNHYTQKSLSLSPGK. (SEQ ID NO: 640)
>Her156_CDS
atggaagcaccagcgcagcttctcttcctcctgctactctggctcccagataccaccggtgaggtgcagctggtgcagtctggggcagaggtgaaa
aagcccggggagtctctgaagatctcctgtaagggttctgggtacagctttagtaactactggatcggctgggtgcgccagatgcccgggaaaggc
ctggagtggatggggatcatctatcctggtgactctgataccagatacagcccgtccttccaaggccaggtcaccatctcagccgacaagtccatca
gtaccgcctacctgcagtggagcagcctgaaggcctcggacagtgccatgtattactgtgcgagacatgattcgactatgggatatgatgcttttcat
atgtggggccaaggaaccctggtcaccgtctcgagtggaggcggcggttcaggcggaggtggctctggcggtggcggaagtgcacaggctgtg
ctgactcagccgtcctcagtgtctggggccccagggcagagggtcaccatctcctgcactgggagcagctccaacatcggggcaggttatgatgt
acactggtaccagcagcttccaggaacagcccccaaactcctcatctatggtaacagcaatcggccctcaggggtccctgaccgattctctggctcc
aagtctggcacctcagcctccctggccatcactgggctccaggctgaggatgaggctgattattactgccagtcctatgacagcagcctgagtggc
cctgtggtattcggcggagggaccaagctgaccgtcctaggtgacgtacgcgagcccaaatcttctgacaaaactcacacatgcccaccgtgccc
agcacctgaactcctgggtggaccgtcagtcttcctcttccccccaaaacccaaggacaccctcatgatctcccggacccctgaggtcacatgcgtg
gtggtggacgtgagccacgaagaccctgaggtcaagttcaactggtacgtggacggcgtggaggtgcataatgccaagacaaagccgcgggag
gagcagtacaacagcacgtaccgtgtggtcagcgtcctcaccgtcctgcaccaggactggctgaatggcaaggagtacaagtgcaaggtctccaa
caaagccctcccagcccccatcgagaaaaccatctccaaagccaaagggcagccccgagaaccacaggtgtacaccctgcccccatcccggga
tgagctgaccaagaaccaggtcagcctgacctgcctggtcaaaggcttctatccaagcgacatcgccgtggagtgggagagcaatgggcagccg
gagaacaactacaagaccacgcctcccgtgctggactccgacggctccttcttcctctacagcaagctcaccgtggacaagagcaggtggcagca
ggggaacgtcttctcatgctccgtgatgcatgaggctctgcacaaccactacacgcagaagagcctctccctgtc
tccgggtaaatga (SEQ ID NO: 641)
>Her156_Protein_leader-stop
MEAPAQLLFLLLLWLPDTTGEVQLVQSGAEVKKPGESLKISCKGSGYSFSNYWIGWVRQMP
GKGLEWMGIIYPGDSDTRYSPSFQGQVTISADKSISTAYLQWSSLKASDSAMYYCARHDSTM
GYDAFHMWGQGTLVTVSSGGGGSGGGGSGGGGSAQAVLTQPSSVSGAPGQRVTISCTGSSS
NIGAGYDVHWYQQLPGTAPKLLIYGNSNRPSGVPDRFSGSKSGTSASLAITGLQAEDEADYY
CQSYDSSLSGPVVFGGGTKLTVLGDVREPKSSDKTHTCPPCPAPELLGGPSVFLFPPKPKDTL
MISRTPEVTCVVVDVSHEDPEVKFNWYVDGVEVHNAKTKPREEQYNSTYRVVSVLTVLHQ
DWLNGKEYKCKVSNKALPAPIEKTISKAKGQPREPQVYTLPPSRDELTKNQVSLTCLVKGFY
PSDIAVEWESNGQPENNYKTTPPVLDSDGSFFLYSKLTVDKSRWQQGNVFSCSVMHEALHN
HYTQKSLSLSPGK. (SEQ ID NO: 642)
>Her157_CDS
atggaagcaccagcgcagcttctcttcctcctgctactctggctcccagataccaccggtgaggtgcagctgttggagtctgggggaggcttggtac
agcctggggggtccctgagactctcctgtgcagcctctggattcacctttagcagctatgccatgagctgggtccgccaggctccagggaagggg
ctggagtgggtctcagctattagtggtagtggtggtagcacatactacgcagactccgtgaagggccggttcaccatctccagagataattccaaga
acacgctgtatctgcaaatgaacagcctgagagccgaggacacggccgtgtattactgtgcgagagtgggggccggggagaactactaccacta
ctacatcatggacgtctggggccggggcaccctggtcaccgtctcgagtggaggcggcggttcaggcggaggtggctctggcggtggcggaag
tgcactttcttctgagctgactcaggaccctgctgtgtctgtggccttgggacagagagtcagggtcacatgccaaggagacagcctcagaggctat
tatgcaagctggtaccagcagaagccaggacaggcccctgttcttgtcatctatggtgaaaacaaccggccctcagggatcccagaccgattctct
ggctccagctcaggaaacacagcttccttgaccatcactggggctcaggcggaagatgaggctgactattactgtaactcccggcacagcagtggt
aattatctggtgttcggcggagggaccaagctgaccgtcctaggtgacgtacgcgagcccaaatcttctgacaaaactcacacatgcccaccgtgc
ccagcacctgaactcctgggtggaccgtcagtcttcctcttccccccaaaacccaaggacaccctcatgatctcccggacccctgaggtcacatgc
gtggtggtggacgtgagccacgaagaccctgaggtcaagttcaactggtacgtggacggcgtggaggtgcataatgccaagacaaagccgcgg
gaggagcagtacaacagcacgtaccgtgtggtcagcgtcctcaccgtcctgcaccaggactggctgaatggcaaggagtacaagtgcaaggtct
ccaacaaagccctcccagcccccatcgagaaaaccatctccaaagccaaagggcagccccgagaaccacaggtgtacaccctgcccccatccc
gggatgagctgaccaagaaccaggtcagcctgacctgcctggtcaaaggcttctatccaagcgacatcgccgtggagtgggagagcaatgggca
gccggagaacaactacaagaccacgcctcccgtgctggactccgacggctccttcttcctctacagcaagctcaccgtggacaagagcaggtggc
agcaggggaacgtcttctcatgctccgtgatgcatgaggctctgcacaaccactacacgcagaagagcctctccctgtctc
cgggtaaatga (SEQ ID NO: 643)
>Her157_Protein_leader-stop
MEAPAQLLFLLLLWLPDTTGEVQLLESGGGLVQPGGSLRLSCAASGFTFSSYAMSWVRQAP
GKGLEWVSAISGSGGSTYYADSVKGRFTISRDNSKNTLYLQMNSLRAEDTAVYYCARVGAG
ENYYHYYIMDVWGRGTLVTVSSGGGGSGGGGSGGGGSALSSELTQDPAVSVALGQRVRVT
CQGDSLRGYYASWYQQKPGQAPVLVIYGENNRPSGIPDRFSGSSSGNTASLTITGAQAEDEA
DYYCNSRHSSGNYLVFGGGTKLTVLGDVREPKSSDKTHTCPPCPAPELLGGPSVFLFPPKPKD
TLMISRTPEVTCVVVDVSHEDPEVKFNWYVDGVEVHNAKTKPREEQYNSTYRVVSVLTVLH
QDWLNGKEYKCKVSNKALPAPIEKTISKAKGQPREPQVYTLPPSRDELTKNQVSLTCLVKGF
YPSDIAVEWESNGQPENNYKTTPPVLDSDGSFFLYSKLTVDKSRWQQGNVFSCSVMHEALH
NHYTQKSLSLSPGK. (SEQ ID NO: 644)
>Her158_CDS
atggaagcaccagcgcagcttctcttcctcctgctactctggctcccagataccaccggtgaggtgcagctgttggagtctgggggaggcttggtac
agcctggggggtccctgagactctcctgtgcagcctctggattcacctttagcagctatgccatgagctgggtccgccaggctccagggaagggg
ctggagtgggtctcagctattagtggtagtggtggtagcacatactacgcagactccgtgaagggccggttcaccatctccagagacaattccaaga
acacgctgtatctgcaaatgaacagcctgagagccgaggacacggccgtgtattactgtgcgagaactacggcagatgcttttgatatctggggca
gagggacaatggtcaccgtctcgagtggaggcggcggttcaggcggaggtggctctggcggtggcggaagtgcactttcttctgagctgactcag
gaccctgctgtgtctgtggccttgggacagacagtcaagatcacatgccaaggcgacagcctcagaaactattatgcaggctggtaccagcagaa
gccaggacaggcccctgtacttgtcatctatggtgaaaacaagcggccctcagggatccctgaccgattctctggctccaactcaggaaacacagc
ttccttgaccctcactggggctcaggcggaagatgaggctgactattactgtaactcccgggacagcagtagtaacctcgtggtattcggcggagg
gaccaagctgaccgtcctaggtgacgtacgcgagcccaaatcttctgacaaaactcacacatgcccaccgtgcccagcacctgaactcctgggtg
gaccgtcagtcttcctcttccccccaaaacccaaggacaccctcatgatctcccggacccctgaggtcacatgcgtggtggtggacgtgagccacg
aagaccctgaggtcaagttcaactggtacgtggacggcgtggaggtgcataatgccaagacaaagccgcgggaggagcagtacaacagcacgt
accgtgtggtcagcgtcctcaccgtcctgcaccaggactggctgaatggcaaggagtacaagtgcaaggtctccaacaaagccctcccagccccc
atcgagaaaaccatctccaaagccaaagggcagccccgagaaccacaggtgtacaccctgcccccatcccgggatgagctgaccaagaaccag
gtcagcctgacctgcctggtcaaaggcttctatccaagcgacatcgccgtggagtgggagagcaatgggcagccggagaacaactacaagacca
cgcctcccgtgctggactccgacggctccttcttcctctacagcaagctcaccgtggacaagagcaggtggcagcaggggaacgtcttctcatgct
ccgtgatgcatgaggctctgcacaaccactacacgcagaagagcctctccctgtctccgggtaaatga (SEQ ID NO: 645)
>Her158_Protein_leader-stop
MEAPAQLLFLLLLWLPDTTGEVQLLESGGGLVQPGGSLRLSCAASGFTFSSYAMSWVRQAP
GKGLEWVSAISGSGGSTYYADSVKGRFTISRDNSKNTLYLQMNSLRAEDTAVYYCARTTAD
AFDIWGRGTMVTVSSGGGGSGGGGSGGGGSALSSELTQDPAVSVALGQTVKITCQGDSLRN
YYAGWYQQKPGQAPVLVIYGENKRPSGIPDRFSGSNSGNTASLTLTGAQAEDEADYYCNSR
DSSSNLVVFGGGTKLTVLGDVREPKSSDKTHTCPPCPAPELLGGPSVFLFPPKPKDTLMISRTP
EVTCVVVDVSHEDPEVKFNWYVDGVEVHNAKTKPREEQYNSTYRVVSVLTVLHQDWLNG
KEYKCKVSNKALPAPIEKTISKAKGQPREPQVYTLPPSRDELTKNQVSLTCLVKGFYPSDIAV
EWESNGQPENNYKTTPPVLDSDGSFFLYSKLTVDKSRWQQGNVFSCSVMHEALHNHYTQKS
LSLSPGK. (SEQ ID NO: 646)
>Her159_CDS
atggaagcaccagcgcagcttctcttcctcctgctactctggctcccagataccaccggtgaggtgcagctgttggagtctgggggaggcttggtac
agcctggggggtccctgagactctcctgtgcagcctctggattcacctttagcagctataccatgagctgggtccgccaggctccagggaaggggc
tggagtgggtctcagctattagtggtagtggtggtagcacatactacgcagactccgtgaagggccggttcaccatctccagagacaattccaagaa
cacgctgtatctgcaaatgaacagcctgagagccgaggacacggccgtgtattactgtgcaaggaatagcagcaattggagtggtgcttttgatatc
tgggggcgggggaccacggtcaccgtctcgagtggaggcggcggttcaggcggaggtggctctggcggtggcggaagtgcacagtctgtgct
gacgcagccgccctcagtgtctggggccccagggcagagggtcaccatctcctgcattggaacccactcaaacatcggggcaggttacgctgtg
aactggtaccagcagcttccaggaacagcccccaaactcctcatctatggtaataacaatcggccctcaggggtccctgaccgattctctggctcca
agtctggcacctcagcctccctggccatcaatgggctccaggctgacgatgagtctgattattattgccagtcctatgacgccagtctgagagttttatt
cggcggagggaccaagctgaccgtcctaggtgacgtacgcgagcccaaatcttctgacaaaactcacacatgcccaccgtgcccagcacctgaa
ctcctgggtggaccgtcagtcttcctcttccccccaaaacccaaggacaccctcatgatctcccggacccctgaggtcacatgcgtggtggtggac
gtgagccacgaagaccctgaggtcaagttcaactggtacgtggacggcgtggaggtgcataatgccaagacaaagccgcgggaggagcagtac
aacagcacgtaccgtgtggtcagcgtcctcaccgtcctgcaccaggactggctgaatggcaaggagtacaagtgcaaggtctccaacaaagccct
cccagcccccatcgagaaaaccatctccaaagccaaagggcagccccgagaaccacaggtgtacaccctgcccccatcccgggatgagctgac
caagaaccaggtcagcctgacctgcctggtcaaaggcttctatccaagcgacatcgccgtggagtgggagagcaatgggcagccggagaacaa
ctacaagaccacgcctcccgtgctggactccgacggctccttcttcctctacagcaagctcaccgtggacaagagcaggtggcagcaggggaac
gtcttctcatgctccgtgatgcatgaggctctgcacaaccactacacgcagaagagcctctccctgtctccgggtaaatga (SEQ ID NO: 647)
>Her159_Protein_leader-stop
MEAPAQLLFLLLLWLPDTTGEVQLLESGGGLVQPGGSLRLSCAASGFTFSSYTMSWVRQAPG
KGLEWVSAISGSGGSTYYADSVKGRFTISRDNSKNTLYLQMNSLRAEDTAVYYCARNSSNW
SGAFDIWGRGTTVTVSSGGGGSGGGGSGGGGSAQSVLTQPPSVSGAPGQRVTISCIGTHSNIG
AGYAVNWYQQLPGTAPKLLIYGNNNRPSGVPDRFSGSKSGTSASLAINGLQADDESDYYCQS
YDASLRVLFGGGTKLTVLGDVREPKSSDKTHTCPPCPAPELLGGPSVFLFPPKPKDTLMISRTP
EVTCVVVDVSHEDPEVKFNWYVDGVEVHNAKTKPREEQYNSTYRVVSVLTVLHQDWLNG
KEYKCKVSNKALPAPIEKTISKAKGQPREPQVYTLPPSRDELTKNQVSLTCLVKGFYPSDIAV
EWESNGQPENNYKTTPPVLDSDGSFFLYSKLTVDKSRWQQGNVFSCSVMHEALHNHYTQKS
LSLSPGK. (SEQ ID NO: 648)
>Her160_CDS
atggaagcaccagcgcagcttctcttcctcctgctactctggctcccagataccaccggtgaggtgcagctgttggagtctgggggaggcttggtac
agcctggggggtccctgagactctcctgtgcagcctctggattcacctttagcagctatgccatgagctgggtccgccaggctccagggaagggg
ctggagtgggtctcagctattagtggtagtggtggtagcacatactacgcagactccgtgaagggccggttcaccatctccagagacaattccaaga
acacgctgtatctgcaaatgaacagcctgagagccgaggacacggccgtgtattactgtgcgagagatgacgatttttggagtggttatccattcctc
tactactactacggtatggacgtctggggccgagggacaatggtcaccgtctcgagtggaggcggcggttcaggcggaggtggctctggcggtg
gcggaagtgcacagtctgtcgtgacgcagccgccctcagcgtctgggacccccgggcagagggtcaccatctcttgttctggaactagttccaaca
tcggaagtaatgctgtaaactggtaccagcaactcccaggaacggcccccaaactcctcatctataataataatcagcggccctcaggggtccctga
ccgattctctggctccaagtctggcacctcagcctccctggccatcagtggactccagtctgaggatgaggctgattattactgtgcagcatgggatg
acagcctgaatgtttatgtggtattcggcggagggaccaagctgaccgtcctaggtgacgtacgcgagcccaaatcttctgacaaaactcacacatg
cccaccgtgcccagcacctgaactcctgggtggaccgtcagtcttcctcttccccccaaaacccaaggacaccctcatgatctcccggacccctga
ggtcacatgcgtggtggtggacgtgagccacgaagaccctgaggtcaagttcaactggtacgtggacggcgtggaggtgcataatgccaagaca
aagccgcgggaggagcagtacaacagcacgtaccgtgtggtcagcgtcctcaccgtcctgcaccaggactggctgaatggcaaggagtacaag
tgcaaggtctccaacaaagccctcccagcccccatcgagaaaaccatctccaaagccaaagggcagccccgagaaccacaggtgtacaccctg
cccccatcccgggatgagctgaccaagaaccaggtcagcctgacctgcctggtcaaaggcttctatccaagcgacatcgccgtggagtgggaga
gcaatgggcagccggagaacaactacaagaccacgcctcccgtgctggactccgacggctccttcttcctctacagcaagctcaccgtggacaag
agcaggtggcagcaggggaacgtcttctcatgctccgtgatgcatgaggctctgcacaaccactacacgcagaagagcctctccctgtctccgggt
aaatga (SEQ ID NO: 649)
>Her160_Protein_leader-stop
MEAPAQLLFLLLLWLPDTTGEVQLLESGGGLVQPGGSLRLSCAASGFTFSSYAMSWVRQAP
GKGLEWVSAISGSGGSTYYADSVKGRFTISRDNSKNTLYLQMNSLRAEDTAVYYCARDDDF
WSGYPFLYYYYGMDVWGRGTMVTVSSGGGGSGGGGSGGGGSAQSVVTQPPSASGTPGQR
VTISCSGTSSNIGSNAVNWYQQLPGTAPKLLIYNNNQRPSGVPDRFSGSKSGTSASLAISGLQS
EDEADYYCAAWDDSLNVYVVFGGGTKLTVLGDVREPKSSDKTHTCPPCPAPELLGGPSVFL
FPPKPKDTLMISRTPEVTCVVVDVSHEDPEVKFNWYVDGVEVHNAKTKPREEQYNSTYRVV
SVLTVLHQDWLNGKEYKCKVSNKALPAPIEKTISKAKGQPREPQVYTLPPSRDELTKNQVSL
TCLVKGFYPSDIAVEWESNGQPENNYKTTPPVLDSDGSFFLYSKLTVDKSRWQQGNVFSCSV
MHEALHNHYTQKSLSLSPGK. (SEQ ID NO: 650)
>Her161_CDS
atggaagcaccagcgcagcttctcttcctcctgctactctggctcccagataccaccggtgaggtgcagctgttggagtctgggggaggcttggtac
agcctggggggtccctgagactctcctgtgcagcctctggattcacctttagcagctatgccatgagctgggtccgccaggctccagggaagggg
ctggagtgggtctcagctattagtggtagtggtggtagcacttactacgcagactccgtgaagggccggttcaccatctccagagacaattccaaga
acacgctgtatctgcaaatgaacagcctgagagccgaggacacggccgtgtattactgtgctaaatggggctgggattactatgacacaactggtc
atgatgcctttgatttctggggccgggggacaatggtcaccgtctcgagtggaggcggcggttcaggcggaggtggctctggcggtggcggaagt
gcacaggctgtgctgactcagccgtcctcagtgtctggggccccagggcagagggtcaccatctcctgcactgggagcagctccaacatcgggg
cagattattatgtaaattggtatcagcaacttccaggaaaagcccccgaaatcgtaatttttaatgatgacaatcggccctcaggggtccctaaccgatt
ctctggctccaagtctggcacctcagcctccctggccatcactgggctccaggctgaagatgaggctgattattattgccagtcttatgacagtgtcct
gagtgcttatgtcttcggaactgggaccaaggtcaccgtcctaggtgacgtacgcgagcccaaatcttctgacaaaactcacacatgcccaccgtgc
ccagcacctgaactcctgggtggaccgtcagtcttcctcttccccccaaaacccaaggacaccctcatgatctcccggacccctgaggtcacatgc
gtggtggtggacgtgagccacgaagaccctgaggtcaagttcaactggtacgtggacggcgtggaggtgcataatgccaagacaaagccgcgg
gaggagcagtacaacagcacgtaccgtgtggtcagcgtcctcaccgtcctgcaccaggactggctgaatggcaaggagtacaagtgcaaggtct
ccaacaaagccctcccagcccccatcgagaaaaccatctccaaagccaaagggcagccccgagaaccacaggtgtacaccctgcccccatccc
gggatgagctgaccaagaaccaggtcagcctgacctgcctggtcaaaggcttctatccaagcgacatcgccgtggagtgggagagcaatgggca
gccggagaacaactacaagaccacgcctcccgtgctggactccgacggctccttcttcctctacagcaagctcaccgtggacaagagcaggtggc
agcaggggaacgtcttctcatgctccgtgatgcatgaggctctgcacaaccactacacgcagaagagcctctccctgtctccgggta
aatga (SEQ ID NO: 651)
>Her161_Protein_leader-stop
MEAPAQLLFLLLLWLPDTTGEVQLLESGGGLVQPGGSLRLSCAASGFTFSSYAMSWVRQAP
GKGLEWVSAISGSGGSTYYADSVKGRFTISRDNSKNTLYLQMNSLRAEDTAVYYCAKWGW
DYYDTTGHDAFDFWGRGTMVTVSSGGGGSGGGGSGGGGSAQAVLTQPSSVSGAPGQRVTIS
CTGSSSNIGADYYVNWYQQLPGKAPEIVIFNDDNRPSGVPNRFSGSKSGTSASLAITGLQAED
EADYYCQSYDSVLSAYVFGTGTKVTVLGDVREPKSSDKTHTCPPCPAPELLGGPSVFLFPPKP
KDTLMISRTPEVTCVVVDVSHEDPEVKFNWYVDGVEVHNAKTKPREEQYNSTYRVVSVLTV
LHQDWLNGKEYKCKVSNKALPAPIEKTISKAKGQPREPQVYTLPPSRDELTKNQVSLTCLVK
GFYPSDIAVEWESNGQPENNYKTTPPVLDSDGSFFLYSKLTVDKSRWQQGNVFSCSVMHEAL
HNHYTQKSLSLSPGK. (SEQ ID NO: 652)
>Her162_CDS
atggaagcaccagcgcagcttctcttcctcctgctactctggctcccagataccaccggtgaggtgcagctggtggagactggggctgaggtgaag
aagcctggggcctcaatgaaggtctcctgcaaggcttctggatacagcttcaccgactactatatgcactgggtgcgacaggcccctggacaaggg
cttgagtggatgggatggatcaaccctaatagtggtgacacaaactatgcacagaagtttcagggcagggtcaccatgaccagggacacgtccatc
accacagcctacatggagctgagcaggctgagatctgacgacacggccgtatattactgtgcgacagagaggtataacagtggctgggaatggg
gccggggcaccctggtcaccgtctcgagtggaggcggcggttcaggcggaggtggctctggcggtggcggaagtgcacagtctgccctgactc
agcctgcctccgtgtctgggtctcctggacagtcgatcaccgtctcctgcactggaaccagcagtgacgttggtgcttataactatgtctcctggtacc
aacaacacccaggcaaagcccccaaactcatgatttatgatgtcactactcggccctcaggggtttctaatcgcttctctggctccaagtctggcaac
acggcctccctgaccatctctgggctccaggctgaggacgaggctgattattactgcacctcatatactcgcagcagcactgtggtcttcggcggag
ggaccaagctgaccgtcctaggtgacgtacgcgagcccaaatcttctgacaaaactcacacatgcccaccgtgcccagcacctgaactcctgggt
ggaccgtcagtcttcctcttccccccaaaacccaaggacaccctcatgatctcccggacccctgaggtcacatgcgtggtggtggacgtgagccac
gaagaccctgaggtcaagttcaactggtacgtggacggcgtggaggtgcataatgccaagacaaagccgcgggaggagcagtacaacagcac
gtaccgtgtggtcagcgtcctcaccgtcctgcaccaggactggctgaatggcaaggagtacaagtgcaaggtctccaacaaagccctcccagccc
ccatcgagaaaaccatctccaaagccaaagggcagccccgagaaccacaggtgtacaccctgcccccatcccgggatgagctgaccaagaacc
aggtcagcctgacctgcctggtcaaaggcttctatccaagcgacatcgccgtggagtgggagagcaatgggcagccggagaacaactacaagac
cacgcctcccgtgctggactccgacggctccttcttcctctacagcaagctcaccgtggacaagagcaggtggcagcaggggaacgtcttctcatg
ctccgtgatgcatgaggctctgcacaaccactacacgcagaagagcctctccctgtctccgggtaaatga (SEQ ID NO: 653)
>Her162_Protein_leader-stop
MEAPAQLLFLLLLWLPDTTGEVQLVETGAEVKKPGASMKVSCKASGYSFTDYYMHWVRQA
PGQGLEWMGWINPNSGDTNYAQKFQGRVTMTRDTSITTAYMELSRLRSDDTAVYYCATER
YNSGWEWGRGTLVTVSSGGGGSGGGGSGGGGSAQSALTQPASVSGSPGQSITVSCTGTSSD
VGAYNYVSWYQQHPGKAPKLMIYDVTTRPSGVSNRFSGSKSGNTASLTISGLQAEDEADYY
CTSYTRSSTVVFGGGTKLTVLGDVREPKSSDKTHTCPPCPAPELLGGPSVFLFPPKPKDTLMIS
RTPEVTCVVVDVSHEDPEVKFNWYVDGVEVHNAKTKPREEQYNSTYRVVSVLTVLHQDWL
NGKEYKCKVSNKALPAPIEKTISKAKGQPREPQVYTLPPSRDELTKNQVSLTCLVKGFYPSDI
AVEWESNGQPENNYKTTPPVLDSDGSFFLYSKLTVDKSRWQQGNVFSCSVMHEALHNHYT
QKSLSLSPGK. (SEQ ID NO: 654)
>Her163_CDS
atggaagcaccagcgcagcttctcttcctcctgctactctggctcccagataccaccggtgaggtgcagctgttggagtctgggggaggcttggtac
agcctggggggtccctgagactctcctgtgcagcctctggattcacctttagcagctatgccatgagctgggtccgccaggctccagggaagggg
ctggagtgggtctcagctattagtggtagtggtggtagcacatactacgcagactccgtgaagggccggttcaccatctccagagacaattccaaga
acacgctgtatctgcaaatgaacagcctgagagccgaggacacggccgtgtattactgtgcggtccatggctacggagactccgtggatgatgctc
ttgatgtctggggccgaggaaccctggtcaccgtctcgagtggaggcggcggttcaggcggaggtggctctggcggtggcggaagtgcacagtc
tgtgctgacgcagccgccctcagcgtctgggacccccgggcagacgatctccatctcttgttctggaagcaactccaacatcggaacttatagtgtta
gctggtaccagcagctcccacgagcggcccccagactcctcgtctatgctaatgatcgccggccctcaggggtccctgaccgattctctggctcca
agtctggcacctcagcctccctggccatcagtgggctccagtctgaggatgaggctgattattactgtgcagtatgggatgacaggttgaatggttttg
tcttcggaactgggaccaagctgaccgtcctaggtgacgtacgcgagcccaaatcttctgacaaaactcacacatgcccaccgtgcccagcacctg
aactcctgggtggaccgtcagtcttcctcttccccccaaaacccaaggacaccctcatgatctcccggacccctgaggtcacatgcgtggtggtgga
cgtgagccacgaagaccctgaggtcaagttcaactggtacgtggacggcgtggaggtgcataatgccaagacaaagccgcgggaggagcagta
caacagcacgtaccgtgtggtcagcgtcctcaccgtcctgcaccaggactggctgaatggcaaggagtacaagtgcaaggtctccaacaaagcc
ctcccagcccccatcgagaaaaccatctccaaagccaaagggcagccccgagaaccacaggtgtacaccctgcccccatcccgggatgagctg
accaagaaccaggtcagcctgacctgcctggtcaaaggcttctatccaagcgacatcgccgtggagtgggagagcaatgggcagccggagaac
aactacaagaccacgcctcccgtgctggactccgacggctccttcttcctctacagcaagctcaccgtggacaagagcaggtggcagcagggga
acgtcttctcatgctccgtgatgcatgaggctctgcacaaccactacacgcagaagagcctctccctgtctccgggtaaatga (SEQ ID NO: 655)
>Her163_Protein_leader-stop
MEAPAQLLFLLLLWLPDTTGEVQLLESGGGLVQPGGSLRLSCAASGFTFSSYAMSWVRQAP
GKGLEWVSAISGSGGSTYYADSVKGRFTISRDNSKNTLYLQMNSLRAEDTAVYYCAVHGYG
DSVDDALDVWGRGTLVTVSSGGGGSGGGGSGGGGSAQSVLTQPPSASGTPGQTISISCSGSN
SNIGTYSVSWYQQLPRAAPRLLVYANDRRPSGVPDRFSGSKSGTSASLAISGLQSEDEADYYC
AVWDDRLNGFVFGTGTKLTVLGDVREPKSSDKTHTCPPCPAPELLGGPSVFLFPPKPKDTLMI
SRTPEVTCVVVDVSHEDPEVKFNWYVDGVEVHNAKTKPREEQYNSTYRVVSVLTVLHQDW
LNGKEYKCKVSNKALPAPIEKTISKAKGQPREPQVYTLPPSRDELTKNQVSLTCLVKGFYPSD
IAVEWESNGQPENNYKTTPPVLDSDGSFFLYSKLTVDKSRWQQGNVFSCSVMHEALHNHYT
QKSLSLSPGK. (SEQ ID NO: 656)
>Her164_CDS
atggaagcaccagcgcagcttctcttcctcctgctactctggctcccagataccaccggtgaggtgcagctgttggagtctgggggaggcttggtac
agcctggggggtccctgagactctcctgtgcagcctctggattcacctttagcagctatgccatgagctgggtccgccaggctccagggaagggg
ctggagtgggtctcagctattagtggtagtggtggtagcacatactacgcagactccgtgaagggccggttcaccatctccagagacaattccaaga
acacgctgtatctgcaaatgaacagcctgagagccgaggacacggccgtgtattactgtgcgaagtatggtggctacgacgctgatgcctttgatgt
ctggggccgagggacaatggtcaccgtctcgagtggaggcggcggttcaggcggaggtggctctggcggtggcggaagtgcacagtctgtcgt
gacgcagccgccctcagtgtctgcggccccaggacagaaggtcaccatctcctgctctggaagtagctccaacattggagattattatgtatcctgg
taccagcaactcccaggaacggcccccacactcctcatttatgacaatgataagcgaccctcagaagttcctgaccgattctctggctccaagtctgg
cacgtcggccaccctcggcatcaccggactccagactggggacgaggccgattattactgcacttcatgggatagcagcctgagtgctggggtgtt
cggcggagggaccaaggtcaccgtcctaggtgacgtacgcgagcccaaatcttctgacaaaactcacacatgcccaccgtgcccagcacctgaa
ctcctgggtggaccgtcagtcttcctcttccccccaaaacccaaggacaccctcatgatctcccggacccctgaggtcacatgcgtggtggtggac
gtgagccacgaagaccctgaggtcaagttcaactggtacgtggacggcgtggaggtgcataatgccaagacaaagccgcgggaggagcagtac
aacagcacgtaccgtgtggtcagcgtcctcaccgtcctgcaccaggactggctgaatggcaaggagtacaagtgcaaggtctccaacaaagccct
cccagcccccatcgagaaaaccatctccaaagccaaagggcagccccgagaaccacaggtgtacaccctgcccccatcccgggatgagctgac
caagaaccaggtcagcctgacctgcctggtcaaaggcttctatccaagcgacatcgccgtggagtgggagagcaatgggcagccggagaacaa
ctacaagaccacgcctcccgtgctggactccgacggctccttcttcctctacagcaagctcaccgtggacaagagcaggtggcagcaggggaac
gtcttctcatgctccgtgatgcatgaggctctgcacaaccactacacgcagaagagcctctccctgtctccgggtaaatga (SEQ ID NO: 657)
>Her164_Protein_leader-stop
MEAPAQLLFLLLLWLPDTTGEVQLLESGGGLVQPGGSLRLSCAASGFTFSSYAMSWVRQAP
GKGLEWVSAISGSGGSTYYADSVKGRFTISRDNSKNTLYLQMNSLRAEDTAVYYCAKYGGY
DADAFDVWGRGTMVTVSSGGGGSGGGGSGGGGSAQSVVTQPPSVSAAPGQKVTISCSGSSS
NIGDYYVSWYQQLPGTAPTLLIYDNDKRPSEVPDRFSGSKSGTSATLGITGLQTGDEADYYCT
SWDSSLSAGVFGGGTKVTVLGDVREPKSSDKTHTCPPCPAPELLGGPSVFLFPPKPKDTLMIS
RTPEVTCVVVDVSHEDPEVKFNWYVDGVEVHNAKTKPREEQYNSTYRVVSVLTVLHQDWL
NGKEYKCKVSNKALPAPIEKTISKAKGQPREPQVYTLPPSRDELTKNQVSLTCLVKGFYPSDI
AVEWESNGQPENNYKTTPPVLDSDGSFFLYSKLTVDKSRWQQGNVFSCSVMHEALHNHYT
QKSLSLSPGK. (SEQ ID NO: 658)
>Her165_CDS
atggaagcaccagcgcagcttctcttcctcctgctactctggctcccagataccaccggtaaggtgcagctggtgcagtctgggtctgagttgaaga
agcctggggcctcagtgaaggtttcctgccaggcttctggatacaccatcactaaccatagcatgaattgggtgcgacaggcccctgggcaaggg
cttgagtggatgggatggatcaacaccaacactgggaaccctacgtatgcccagggcttcacaggacggtttgtcttctccttggacacctctgcca
acacggcaactttgcagatcaccaacgtgcaggctgaggacacagccgtctactactgtgcgagagaggggagtatagacgtgtctggaacgcc
ctactactacggaatggacgcctgggggcaagggaccacggtcaccgtctcctcaggtggaggcggttcaggcggaggtggcagcggcggtg
gcggatcgcagtctgtgctgactcagcctgcctccgtgtctgggtctcctggacagtcgatcaccatctcctgcactggaaccagcagtgacgttgg
tggttataactatgtctcctggtaccaacaacacccaggcaaagcccccaaactcatgatttatgagggcagtgagcggccctcaggggttcctaat
cgcttctctggctccaagtctggcaacacggcctccctgacaatctctgggctccaggctgaggacgaggctgattattactgcagctcatatacaac
caggagcactcgagttttcggcggagggaccaagctgaccatcctaggtgacgtacgcgagcccaaatcttctgacaaaactcacacatgcccac
cgtgcccagcacctgaactcctgggtggaccgtcagtcttcctcttccccccaaaacccaaggacaccctcatgatctcccggacccctgaggtca
catgcgtggtggtggacgtgagccacgaagaccctgaggtcaagttcaactggtacgtggacggcgtggaggtgcataatgccaagacaaagcc
gcgggaggagcagtacaacagcacgtaccgtgtggtcagcgtcctcaccgtcctgcaccaggactggctgaatggcaaggagtacaagtgcaa
ggtctccaacaaagccctcccagcccccatcgagaaaaccatctccaaagccaaagggcagccccgagaaccacaggtgtacaccctgccccc
atcccgggatgagctgaccaagaaccaggtcagcctgacctgcctggtcaaaggcttctatccaagcgacatcgccgtggagtgggagagcaat
gggcagccggagaacaactacaagaccacgcctcccgtgctggactccgacggctccttcttcctctacagcaagctcaccgtggacaagagca
ggtggcagcaggggaacgtcttctcatgctccgtgatgcatgaggctctgcacaaccactacacgcagaagagcctctccctgtctccgggtaaat
ga (SEQ ID NO: 659)
>Her165_Protein_leader-stop
MEAPAQLLFLLLLWLPDTTGKVQLVQSGSELKKPGASVKVSCQASGYTITNHSMNWVRQAP
GQGLEWMGWINTNTGNPTYAQGFTGRFVFSLDTSANTATLQITNVQAEDTAVYYCAREGSI
DVSGTPYYYGMDAWGQGTTVTVSSGGGGSGGGGSGGGGSQSVLTQPASVSGSPGQSITISCT
GTSSDVGGYNYVSWYQQHPGKAPKLMIYEGSERPSGVPNRFSGSKSGNTASLTISGLQAEDE
ADYYCSSYTTRSTRVFGGGTKLTILGDVREPKSSDKTHTCPPCPAPELLGGPSVFLFPPKPKDT
LMISRTPEVTCVVVDVSHEDPEVKFNWYVDGVEVHNAKTKPREEQYNSTYRVVSVLTVLHQ
DWLNGKEYKCKVSNKALPAPIEKTISKAKGQPREPQVYTLPPSRDELTKNQVSLTCLVKGFY
PSDIAVEWESNGQPENNYKTTPPVLDSDGSFFLYSKLTVDKSRWQQGNVFSCSVMHEALHN
HYTQKSLSLSPGK. (SEQ ID NO: 660)
>Her166_CDS
atggaagcaccagcgcagcttctcttcctcctgctactctggctcccagataccaccggtcaggtgcagctggtgcagtctggggcagaaataaaa
aagccgggggagtctctgaagatctcctgtgagggttctggatacaggtttaccagccactggatcggctgggtgcgccagatgcccgggaaagg
cctggagtggatggggatcatctatcctggtgactctgataccagatacagcccgtccttccaaggccaggtcaccatctcagccgacaagtccatc
agcaccgcctacctgcagtggagcagcctgaaggcctcggacaccgccatgtattactgtgcgagacatagtgcgacgcatgatgcttttgatatct
ggggccggggcaccctggtcaccgtctcgagtggaggcggcggttcaggcggaggtggctctggcggtggcggaagtgcacagtctgtgttga
cgcagccgccctcagtgtctggggccccagggcagagggtcaccatctcctgtagtgggagcagctccaacatcgggacaggttacgatgttcac
tggtaccagcaacttccaggaacagcccccaaactcctcatctatagtttcaataagcggccctcaggggtccctgaccggttctctgcctccaagtc
tggcacctcagcctccctggtcatcactgggctccaggctgaggatgaggctgattattactgccagtcctatgacaatttgagtggtccccatgtggt
tttcggcacagggaccaagctgaccgtcctaggtgacgtacgcgagcccaaatcttctgacaaaactcacacatgcccaccgtgcccagcacctg
aactcctgggtggaccgtcagtcttcctcttccccccaaaacccaaggacaccctcatgatctcccggacccctgaggtcacatgcgtggtggtgga
cgtgagccacgaagaccctgaggtcaagttcaactggtacgtggacggcgtggaggtgcataatgccaagacaaagccgcgggaggagcagta
caacagcacgtaccgtgtggtcagcgtcctcaccgtcctgcaccaggactggctgaatggcaaggagtacaagtgcaaggtctccaacaaagcc
ctcccagcccccatcgagaaaaccatctccaaagccaaagggcagccccgagaaccacaggtgtacaccctgcccccatcccgggatgagctg
accaagaaccaggtcagcctgacctgcctggtcaaaggcttctatccaagcgacatcgccgtggagtgggagagcaatgggcagccggagaac
aactacaagaccacgcctcccgtgctggactccgacggctccttcttcctctacagcaagctcaccgtggacaagagcaggtggcagcagggga
acgtcttctcatgctccgtgatgcatgaggctctgcacaaccactacacgcagaagagcctctccctgtctccgggtaaatga (SEQ ID NO: 661)
>Her166_Protein_leader-stop
MEAPAQLLFLLLLWLPDTTGQVQLVQSGAEIKKPGESLKISCEGSGYRFTSHWIGWVRQMPG
KGLEWMGIIYPGDSDTRYSPSFQGQVTISADKSISTAYLQWSSLKASDTAMYYCARHSATHD
AFDIWGRGTLVTVSSGGGGSGGGGSGGGGSAQSVLTQPPSVSGAPGQRVTISCSGSSSNIGTG
YDVHWYQQLPGTAPKLLIYSFNKRPSGVPDRFSASKSGTSASLVITGLQAEDEADYYCQSYD
NLSGPHVVFGTGTKLTVLGDVREPKSSDKTHTCPPCPAPELLGGPSVFLFPPKPKDTLMISRTP
EVTCVVVDVSHFDPEVKFNWYVDGVEVHNAKTKPREEQYNSTYRVVSVLTVLHQDWLNG
KEYKCKVSNKALPAPIEKTISKAKGQPREPQVYTLPPSRDELTKNQVSLTCLVKGFYPSDIAV
EWESNGQPENNYKTTPPVLDSDGSFFLYSKLTVDKSRWQQGNVFSCSVMHEALHNHYTQKS
LSLSPGK. (SEQ ID NO: 662)
>Her167_CDS
atggaagcaccagcgcagcttctcttcctcctgctactctggctcccagataccaccggtcaggtgcagctgcaggagtcgggcccaggactggtg
aagccttcggagaccctgtccctcacctgcactgtctctggtggctccatcaccagtgatctttcctactggggctggctccgccagccccccggga
agggtctggagtggattgcgagtggtggtgacggtgagagcacctactacaacccgtccctcaacggtcgagtcaccttttccgtggacacgccca
agaaccaattctccctgaggctgagctctgtgaccgccgcagacacggctgtatattactgtgcgagacacccactctactattgtagtggtggtcgc
tgctactccgggaactttgacttttggggccagggaaccctggtcaccgtctcgagtggaggcggcggttcaggcggaggtggctctggcggtgg
cggaagtgcacaggctgtgctgactcagccgtcctcagcgtctgggacccccggtcagagggtcaccatttcttgttctggaacgacccccaatatt
ggaagtaattttgtctactggtatcaacaactcccagggacggcccccaaactcctcatctacaggaatgagcagcgcccttcaggggtccctgtcc
gattctctggctccaagtctggcacatcagcctccctggccatcagtgacctccggtccgaggatgaggctgactattactgtgcagcgtgggatga
cagcctgagtggtgtggtcttcggcggggggaccaagctgaccgtcctaggtgacgtacgcgagcccaaatcttctgacaaaactcacacatgcc
caccgtgcccagcacctgaactcctgggtggaccgtcagtcttcctcttccccccaaaacccaaggacaccctcatgatctcccggacccctgagg
tcacatgcgtggtggtggacgtgagccacgaagaccctgaggtcaagttcaactggtacgtggacggcgtggaggtgcataatgccaagacaaa
gccgcgggaggagcagtacaacagcacgtaccgtgtggtcagcgtcctcaccgtcctgcaccaggactggctgaatggcaaggagtacaagtg
caaggtctccaacaaagccctcccagcccccatcgagaaaaccatctccaaagccaaagggcagccccgagaaccacaggtgtacaccctgcc
cccatcccgggatgagctgaccaagaaccaggtcagcctgacctgcctggtcaaaggcttctatccaagcgacatcgccgtggagtgggagagc
aatgggcagccggagaacaactacaagaccacgcctcccgtgctggactccgacggctccttcttcctctacagcaagctcaccgtggacaagag
caggtggcagcaggggaacgtcttctcatgctccgtgatgcatgaggctctgcacaaccactacacgcagaagagcctctccctgtctccgggtaa
atga (SEQ ID NO: 663)
>Her167_Protein_leader-stop
MEAPAQLLFLLLLWLPDTTGQVQLQESGPGLVKPSETLSLTCTVSGGSITSDLSYWGWLRQP
PGKGLEWIASGGDGESTYYNPSLNGRVTFSVDTPKNQFSLRLSSVTAADTAVYYCARHPLYY
CSGGRCYSGNFDFWGQGTLVTVSSGGGGSGGGGSGGGGSAQAVLTQPSSASGTPGQRVTIS
CSGTTPNIGSNFVYWYQQLPGTAPKLLIYRNEQRPSGVPVRFSGSKSGTSASLAISDLRSEDEA
DYYCAAWDDSLSGVVFGGGTKLTVLGDVREPKSSDKTHTCPPCPAPELLGGPSVFLFPPKPK
DTLMISRTPEVTCVVVDVSHEDPEVKFNWYVDGVEVHNAKTKPREEQYNSTYRVVSVLTVL
HQDWLNGKEYKCKVSNKALPAPIEKTISKAKGQPREPQVYTLPPSRDELTKNQVSLTCLVKG
FYPSDIAVEWESNGQPENNYKTTPPVLDSDGSFFLYSKLTVDKSRWQQGNVFSCSVMHEALH
NHYTQKSLSLSPGK. (SEQ ID NO: 664)
>Her168_CDS
atggaagcaccagcgcagcttctcttcctcctgctactctggctcccagataccaccggtgaggtgcagctgttggagtctgggggaggcttggtac
agcctggggggtccctgagactctcctgtgcagcctctggattcacctttagcagctatgccatgagctgggtccgccaggctccagggaagggg
ctggagtgggtctcagctattagtggtagtggtggtagcacatactacgcagactccgtgaggggccggttcaccatctccagagacaattccaaga
acacgctgtatctgcaaatgaacagcctgagagccgaggacacggccgtgtattactgtgcaacttcgttgggttacggtgactttgactactgggg
gcgagggaccacggttaccgtctcgagtggaggcggcggttcaggcggaggtggctctggcggtggcggaagtgcacaggctgtgctgactca
gccgtcctcagcgtctggggcccccgggcacagggtcatcatctcttgttctggaagcagctccaacatcggaagttattatgtaagctggtaccag
cagctcccaggagcggcccccaaactcctcatctatcgtaatgatgagcggccctcaggggtccctgcccgattctctggctccacgtctggcacct
cagcctccctggccatcagtgggctccactctgaggatgaggctgattattattgtgcagcatgggatgacagcctgaatggtccggttttcggcgg
agggaccaaggtcaccgtcctaggtgacgtacgcgagcccaaatcttctgacaaaactcacacatgcccaccgtgcccagcacctgaactcctgg
gtggaccgtcagtcttcctcttccccccaaaacccaaggacaccctcatgatctcccggacccctgaggtcacatgcgtggtggtggacgtgagcc
acgaagaccctgaggtcaagttcaactggtacgtggacggcgtggaggtgcataatgccaagacaaagccgcgggaggagcagtacaacagca
cgtaccgtgtggtcagcgtcctcaccgtcctgcaccaggactggctgaatggcaaggagtacaagtgcaaggtctccaacaaagccctcccagcc
cccatcgagaaaaccatctccaaagccaaagggcagccccgagaaccacaggtgtacaccctgcccccatcccgggatgagctgaccaagaac
caggtcagcctgacctgcctggtcaaaggcttctatccaagcgacatcgccgtggagtgggagagcaatgggcagccggagaacaactacaaga
ccacgcctcccgtgctggactccgacggctccttcttcctctacagcaagctcaccgtggacaagagcaggtggcagcaggggaacgtcttctcat
gctccgtgatgcatgaggctctgcacaaccactacacgcagaagagcctctccctgtctccgggtaaatga (SEQ ID NO: 665)
>Her168_Protein_leader-stop
MEAPAQLLFLLLLWLPDTTGEVQLLESGGGLVQPGGSLRLSCAASGFTFSSYAMSWVRQAP
GKGLEWVSAISGSGGSTYYADSVRGRFTISRDNSKNTLYLQMNSLRAEDTAVYYCATSLGY
GDFDYWGRGTTVTVSSGGGGSGGGGSGGGGSAQAVLTQPSSASGAPGHRVIISCSGSSSNIGS
YYVSWYQQLPGAAPKLLIYRNDERPSGVPARFSGSTSGTSASLAISGLHSEDEADYYCAAWD
DSLNGPVFGGGTKVTVLGDVREPKSSDKTHTCPPCPAPELLGGPSVFLFPPKPKDTLMISRTPE
VTCVVVDVSHEDPEVKFNWYVDGVEVHNAKTKPREEQYNSTYRVVSVLTVLHQDWLNGK
EYKCKVSNKALPAPIEKTISKAKGQPREPQVYTLPPSRDELTKNQVSLTCLVKGFYPSDIAVE
WESNGQPENNYKTTPPVLDSDGSFFLYSKLTVDKSRWQQGNVFSCSVMHEALHNHYTQKSL
SLSPGK. (SEQ ID NO: 666)
>Her169_CDS
atggaagcaccagcgcagcttctcttcctcctgctactctggctcccagataccaccggtgaggtgcagctgttggagtctgggggaggcttggtac
agcctggggggtccctgagactctcctgtgcagcctctggattcacctttagcagctatgccatgagctgggtccgccaggctccagggaagggg
ctggagtgggtctcagctattagtggtagtggtggtagcacatactacgcagactccgtgaagggccggttcaccatctccagagacaattccaaga
acacgctgtatctgcaaatgaacagcctgagagccgaggacacggccgtgtattactgtgcgagaggctttggtgactactggggccgggggaca
atggtcaccgtctcgagtggaggcggcggttcaggcggaggtggctctggcggtggcggaagtgcactttcttctgagctgactcaggaccctgct
gtgtctgtggccttgggacagacagtcaggatcacatgccaaggagacagcctcagaagttattatgcaagctggtaccagcagaagccaggaca
ggcccctgtacttgtcatctatgctaaaaacaaccgaccctcagggatcccagaccgattctctggctccgactcaggaaacacagcttccttgacca
tcactggggctcaggcggaagatgaggctgactattactgtctctcccgggacagcagtggtaaccatctggtattcggcggagggaccaagctg
accgtcctaggtgacgtacgcgagcccaaatcttctgacaaaactcacacatgcccaccgtgcccagcacctgaactcctgggtggaccgtcagtc
ttcctcttccccccaaaacccaaggacaccctcatgatctcccggacccctgaggtcacatgcgtggtggtggacgtgagccacgaagaccctga
ggtcaagttcaactggtacgtggacggcgtggaggtgcataatgccaagacaaagccgcgggaggagcagtacaacagcacgtaccgtgtggt
cagcgtcctcaccgtcctgcaccaggactggctgaatggcaaggagtacaagtgcaaggtctccaacaaagccctcccagcccccatcgagaaa
accatctccaaagccaaagggcagccccgagaaccacaggtgtacaccctgcccccatcccgggatgagctgaccaagaaccaggtcagcctg
acctgcctggtcaaaggcttctatccaagcgacatcgccgtggagtgggagagcaatgggcagccggagaacaactacaagaccacgcctccc
gtgctggactccgacggctccttcttcctctacagcaagctcaccgtggacaagagcaggtggcagcaggggaacgtcttctcatgctccgtgatg
catgaggctctgcacaaccactacacgcagaagagcctctccccgtctccgggtaaatga (SEQ ID NO: 667)
>Her169_Protein_leader-stop
MEAPAQLLFLLLLWLPDTTGEVQLLESGGGLVQPGGSLRLSCAASGFTFSSYAMSWVRQAP
GKGLEWVSAISGSGGSTYYADSVKGRFTISRDNSKNTLYLQMNSLRAEDTAVYYCARGFGD
YWGRGTMVTVSSGGGGSGGGGSGGGGSALSSELTQDPAVSVALGQTVRITCQGDSLRSYYA
SWYQQKPGQAPVLVIYAKNNRPSGIPDRFSGSDSGNTASLTITGAQAEDEADYYCLSRDSSG
NHLVFGGGTKLTVLGDVREPKSSDKTHTCPPCPAPELLGGPSVFLFPPKPKDTLMISRTPEVTC
VVVDVSHEDPEVKFNWYVDGVEVHNAKTKPREEQYNSTYRVVSVLTVLHQDWLNGKEYK
CKVSNKALPAPIEKTISKAKGQPREPQVYTLPPSRDELTKNQVSLTCLVKGFYPSDIAVEWES
NGQPENNYKTTPPVLDSDGSFFLYSKLTVDKSRWQQGNVFSCSVMHEALHNHYTQKSLSPSP
GK. (SEQ ID NO: 668)
>Her170_CDS
atggaagcaccagcgcagcttctcttcctcctgctactctggctcccagataccaccggtgaggtgcagctgttggagtctgggggaggcttggtac
agcctggggggtccctgagactctcctgtgcagcctctggattcacctttagcagctatgccatgagctgggtccgccaggctccagggaagggg
ctggagtgggtctcagctattagtggtagtggtggtagcacatactacgcagactccgtgaagggccggttcaccatctccagagacaattccaaga
acacgctgtatctgcaaatgaacagcctgagagccgaggacacggccgtgtattactgtgcgagaactacggcagatgcttttgatatctggggga
gggggaccacggtcaccgtctcgagtggaggcggcggttcaggcggaggtggctctggcggtggcggaagtgcactttcttctgagctgactca
ggaccctgctgtgtctgtggccctgggacagacagtcagcatcacatgccagggagacagcctcagaaacttttatgcaagctggtacctgcagaa
gccaggacaggccccaatacttgtcatctatggtaaaaacaagcggccctctgggatcccagaccgagtctctggctccagctcagaagacacag
cttccttgaccatcactggggctcaggcggaagatgaggctgactattactgtaactcccgggacagcagtggtaacgtggtcttcggcgggggga
ccaagctgaccgtcctaggtgacgtacgcgagcccaaatcttctgacaaaactcacacatgcccaccgtgcccagcacctgaactcctgggtgga
ccgtcagtcttcctcttccccccaaaacccaaggacaccctcatgatctcccggacccctgaggtcacatgcgtggtggtggacgtgagccacgaa
gaccctgaggtcaagttcaactggtacgtggacggcgtggaggtgcataatgccaagacaaagccgcgggaggagcagtacaacagcacgtac
cgtgtggtcagcgtcctcaccgtcctgcaccaggactggctgaatggcaaggagtacaagtgcaaggtctccaacaaagccctcccagcccccat
cgagaaaaccatctccaaagccaaagggcagccccgagaaccacaggtgtacaccctgcccccatcccgggatgagctgaccaagaaccaggt
cagcctgacctgcctggtcaaaggcttctatccaagcgacatcgccgtggagtgggagagcaatgggcagccggagaacaactacaagaccac
gcctcccgtgctggactccgacggctccttcttcctctacagcaagctcaccgtggacaagagcaggtggcagcaggggaacgtcttctcatgctc
cgtgatgcatgaggctctgcacaaccactacacgcagaagagcctctccccgtctccgggtaaatga (SEQ ID NO: 669)
>Her170_Protein_leader-stop
MEAPAQLLFLLLLWLPDTTGEVQLLESGGGLVQPGGSLRLSCAASGFTFSSYAMSWVRQAP
GKGLEWVSAISGSGGSTYYADSVKGRFTISRDNSKNTLYLQMNSLRAEDTAVYYCARTTAD
AFDIWGRGTTVTVSSGGGGSGGGGSGGGGSALSSELTQDPAVSVALGQTVSITCQGDSLRNF
YASWYLQKPGQAPILVIYGKNKRPSGIPDRVSGSSSEDTASLTITGAQAEDEADYYCNSRDSS
GNVVFGGGTKLTVLGDVREPKSSDKTHTCPPCPAPELLGGPSVFLFPPKPKDTLMISRTPEVT
CVVVDVSHEDPEVKFNWYVDGVEVHNAKTKPREEQYNSTYRVVSVLTVLHQDWLNGKEY
KCKVSNKALPAPIEKTISKAKGQPREPQVYTLPPSRDELTKNQVSLTCLVKGFYPSDIAVEWE
SNGQPENNYKTTPPVLDSDGSFFLYSKLTVDKSRWQQGNVFSCSVMHEALHNHYTQKSLSPS
PGK. (SEQ ID NO: 670)
> Stumpy Peptide: Her2 N-terminal membrane proximal region of p95 (amino acid 645-656 of
HER2) fused with EKK sequence
EQRASPLTSIIS-EKK (SEQ ID NO: 671)
> Scrambled Peptide: Scrambled sequence, used as a negative control/de-selection protein
PEISLSQRITAS-EKK (SEQ ID NO: 672)

1. A binding protein that specifically binds ErbB2, wherein the binding protein is an ErbB2 agonist.

2. The binding protein of claim 1 which reduces cellular proliferation in an ErbB2-expressing cancer cell.

3. The binding protein of claim 1 which increases apoptosis in an ErbB2-expressing tumor.

4. The binding protein of claim 1 which reduces the growth of an ErbB2-expressing tumor.

5. The binding protein of claim 2 wherein the ErbB2-expressing cancer cell is a breast cancer cell.

6. The binding protein of claim 2 wherein the ErbB2 expressing cancer cell is from a cell line selected from the group consisting of: SKBR3, BT474, MDA-MB-453 and MDA-MB-361.

7. A binding protein that specifically binds ErbB2, wherein the binding protein preferentially binds an ErbB2 extracellular domain (ECD) homo-dimer over ErbB2 ECD monomer and shed ErbB2 ECD.

8. The binding protein of claim 1, wherein the binding protein preferentially binds an ErbB2 extracellular domain (ECD) homo-dimer over ErbB2 ECD monomer and shed ErbB2 ECD.

9. The binding protein of claim 2, that possesses one or more or the following properties:
(a) increases ErbB2 phosphorylation in a breast cancer cell;
(b) increases the phosphorylation of one or more of AKT, MAPK, MEK, ERK1 and ERK2;
(c) binds ErbB2 ECD in a location selected from the group consisting of: the L1/CR1 domain, the L2 domain, the CR2 domain;
(d) internalizes in an ErbB2-expressing cell;
(e) decreases ErbB2 ECD shedding compared to cells not treated with the binding protein;
(f) decreases the amount of cell surface ErbB2 compared to cells not treated with the binding protein;
(g) binds macaque ErbB2;
(h) binds mouse ErbB2;
(i) has Fc dependent cellular cytotoxicity activity with ErbB2-expressing cells;
(i) is stable in plasma for at least 96 hours;
(k) has antiproliferative activity that is reversible by inhibiting MEK-mediated phosphorylation, ERK2-mediated phosphorylation, or both; or
(l) enhances the cytotoxic effect of a chemotherapeutic.

10. The binding protein of claim 1 which is an antibody, an antigen-binding fragment of an antibody or a small modular immunopharmaceutical (SMIP).

11. The binding protein of claim 10 which is an antigen-binding fragment of an antibody, wherein the antigen-binding fragment is selected from the group consisting of: a Fab fragment, an F(ab′)2 fragment, an scFv, a dAb, and Fv fragment and a VHH.

12. The binding protein of claim 1, which is human antibody or an antigen-binding fragment thereof.

13. The binding protein of claim 1, wherein the ErbB2 is human ErbB2 (SEQ ID NO: 246).

14. A binding protein that specifically binds ErbB2, wherein the binding protein comprises:
(a) a VH domain or an antigen-binding portion thereof comprising the CDR1, CDR2 and CDR3 amino acid sequences set forth in any one of SEQ ID NOS: 1, 3, 5, 7, 9, 11, 13, 15, 17, 19, 21, 23, 25, 27, 29, 31, 33, 35, 37, 39, 41, 43, 45, 47, 49, 51, 53, 55, 57, 59, 61, 65, 67, 251, 255, 259, 263, 267, 271, 275, 279, 283, 287, 291, 295, 299, 303, 307, 311, 315, 319, 323, 327, 331, 335, 339, 343, 347, 351, 355, 359, 363, 367, 371, 375, 379, 383, 387, 391, 395, 399, 403, 407, 411, 415, 419, 423, 427, 431, 435, 439, 443, 447, 451, 455, 459, 463, 467, 471, 475, 479, 483, 487, 491, 495, 499, 503, 507, 511, 515, 519 and 523; or
(b) a VL domain or an antigen-binding portion thereof comprising the CDR1, CDR2 and CDR3 amino acid sequences set forth in any one of SEQ ID NOS: 2, 4, 6, 8, 10, 12, 14, 16, 18, 20, 22, 24, 26, 28, 30, 32, 34, 36, 38, 40, 42, 44, 46, 48, 50, 52, 54, 56, 58, 60, 62, 63, 64, 66, 68, 69, 70, 71, 72, 73, 74, 75, 76, 77, 78, 79, 80, 81, 82, 83, 84, 85, 86, 87, 88, 89, 90, 91, 92, 93, 94, 95, 253, 257, 261, 265, 269, 273, 277, 281, 285, 289, 293, 297, 301, 305, 309, 313, 317, 321, 325, 329, 333, 337, 341, 345, 349, 353, 357, 361, 365, 369, 373, 377, 381, 385, 389, 393, 397, 401, 405, 409, 413, 417, 421, 425, 429, 433, 437, 441, 445, 449, 453, 457, 461, 465, 469, 473, 477, 481, 485, 489, 493, 497, 501, 505, 509, 513, 517, 521 and 525; or
(c) a VH domain or an antigen-binding portion thereof of (a) and a VL domain or an antigen-binding portion thereof of (b).

15. The binding protein of claim 14, comprising the VH CDR1, CDR2 and CDR3 amino acid sequences and the VL CDR1, CDR2 and CDR3 sequences of any one of: S1R2A_CS_{—}1F7, S1R2A_CS_{—}1D11, S1R2C_CS_{—}1D3, S1R2C_CS_{—}1H12, S1R2A_CS_{—}1D3, S1R3B2_BMV_{—}1E1, S1R3C1_CS_{—}1D3, S1R3B2_DP47_{—}1E8, S1R3B2_BMV_{—}1G2, S1R3B2_BMV_{—}1H5, S1R3C1_CS_{—}1A6, S1R3B2_DP47_{—}1C9, S1R3B2_DP47_{—}1E10, S1R3C1_CS_{—}1B10, S1R3A1_BMV_{—}1F3, S1R3B1_BMV_{—}1G11, S1R3A1_BMV_{—}1G4, S1R3B1_BMV_{—}1H11, S1R3A1_CS_{—}1B9, S1R3B1_BMV_{—}1H9, S1R3A1_CS_{—}1B10, S1R3B1_BMV_{—}1C12, S1R3C1_BMV_{—}1H11, S1R3B1_BMV_{—}1A10, S1R3A1_CS_{—}1D11, S1R3C1_DP47_{—}1H1, S1R3A1_CS_{—}1B12, S1R3B1_BMV_{—}1H5, S1R3A1_DP47_{—}1A6, S1R3B1_DP47_{—}1E1, S1R3B1_BMV_{—}1A1, S1R3B1_DP47_{—}3A2, S1R3A1_DP47_{—}11B7, S1R3A1_DP47_{—}11D1, S1R3A1_DP47_{—}7F3, S1R2B_DP47_{—}4E3, S1R3C1_DP47_{—}2G2, S1R3A1_DP47_{—}11H6, S1R3A1_BMV_{—}3B1, S1R3A1_DP47_{—}6B9, S1R2A_CS_{—}10B8, S1R3A1_DP47_{—}7A6, S1R3B2_DP47_{—}2G3, S1R2B_CS_{—}6H11, S1R3A1_DP47_{—}10G1, S1R3A1_DP47_{—}7C1, S1R2A_DP47_{—}5D6, S1R3A1_DP47_{—}11F6, S1R3A_DP47_{—}11D3, S1R3A1_CS_{—}8A8, S1R3A1_BMV_{—}5D10, S1R3A1_DP47_{—}11C1, S1R3A1_DP47_{—}4E1, S1R3A1_DP47_{—}10E1, S1R3A1_CS_{—}11C3, S1R3A1_CS_{—}13H11, S1R3A1_CS_{—}2D9, S1R2A_CS_{—}3D4, S1R3A1_DP47_{—}2H6, S1R3A1_DP47_{—}4G1, S1R2A_DP47_{—}3C1, S1R3A1_DP47_{—}7B2, S1R3B2_DP47_{—}4E2, S1R3A1_CS_{—}16C2, S1R3A1_CS_{—}11E5, S1R3A1_CS_{—}16D7, S1R2A_CS_{—}10B10, S1R3A1_CS_{—}15C2, S1R3A1_CS_{—}9C1, S1R2A_CS_{—}5A1, S1R2A_CS_{—}8C8, S1R3A1_CS_{—}13H5, S1R2B_CS_{—}5E9, S1R3A1_CS_{—}8F9, S1R3A1_CS_{—}14B5, S1R2A_CS_{—}9E10, S1R3A1_CS_{—}7A10, S1R3A1_BMV_{—}6H7, S1R3A1_CS_{—}12A11, S1R3A1_CS_{—}13D12, S1R3A1_CS_{—}7A8, S1R2A_CS_{—}2C9, S1R3A1_CS_{—}12D1, S1R2A_CS_{—}7D4, S1R3A1_CS_{—}15B8, S6R3_DP47_{—}1A10, S6R2_DP47_{—}1E11, S5R2_DP47_{—}1H11, S6R3_CS_{—}1G5, S6R2_DP47_{—}1H1, S5R3_DP47_{—}1A10, S5R2_DP47_{—}1D11, S5R2_CS_{—}1A8, S6R3_CS_{—}1B7, S6R2_CS_{—}1E5, S6R3_BMV_{—}1C2, S5R2_DP47_{—}1B10, S6R3_DP47_{—}1C12, S5R2_DP47_{—}1D10, and S6R3_DP47_{—}1H9.

16. A binding protein that specifically binds ErbB2, wherein the binding protein comprises:
(a) a VH domain having an amino acid sequence that is at least 90% identical to any one of SEQ ID NOS: 1, 3, 5, 7, 9, 11, 13, 15, 17, 19, 21, 23, 25, 27, 29, 31, 33, 35, 37, 39, 41, 43, 45, 47, 49, 51, 53, 55, 57, 59, 61, 65, 67, 251, 255, 259, 263, 267, 271, 275, 279, 283, 287, 291, 295, 299, 303, 307, 311, 315, 319, 323, 327, 331, 335, 339, 343, 347, 351, 355, 359, 363, 367, 371, 375, 379, 383, 387, 391, 395, 399, 403, 407, 411, 415, 419, 423, 427, 431, 435, 439, 443, 447, 451, 455, 459, 463, 467, 471, 475, 479, 483, 487, 491, 495, 499, 503, 507, 511, 515, 519 and 523; or
(b) a VL domain having an amino acid sequence that is at least 90% identical to any one of SEQ ID NOS: 2, 4, 6, 8, 10, 12, 14, 16, 18, 20, 22, 24, 26, 28, 30, 32, 34, 36, 38, 40, 42, 44, 46, 48, 50, 52, 54, 56, 58, 60, 62, 63, 64, 66, 68, 69, 70, 71, 72, 73, 74, 75, 76, 77, 78, 79, 80, 81, 82, 83, 84, 85, 86, 87, 88, 89, 90, 91, 92, 93, 94, 95, 253, 257, 261, 265, 269, 273, 277, 281, 285, 289, 293, 297, 301, 305, 309, 313, 317, 321, 325, 329, 333, 337, 341, 345, 349, 353, 357, 361, 365, 369, 373, 377, 381, 385, 389, 393, 397, 401, 405, 409, 413, 417, 421, 425, 429, 433, 437, 441, 445, 449, 453, 457, 461, 465, 469, 473, 477, 481, 485, 489, 493, 497, 501, 505, 509, 513, 517, 521 and 525; or
(c) a VH domain of (a) and a VL domain of (b); or
(d) VH domain and VL domain amino acid sequence that are at least 90% identical to the VH and VL, amino acid sequences, respectively, in any one of S1R2A_CS_{—}1F7, S1R2A_CS_{—}1D11, S1R2C_CS_{—}1D3, S1R2C_CS_{—}1H12, S1R2A_CS_{—}1D3, S1R3B2_BMV_{—}1E1, S1R3C1_CS_{—}1D3, S1R3B2_DP47_{—}1E8, S1R3B2_BMV_{—}1G2, S1R3B2_BMV_{—}1H5, S1R3C1_CS_{—}1A6, S1R3B2_DP47_{—}1C9, S1R3B2_DP47_{—}1E10, S1R3C1_CS_{—}1B10, S1R3A1_BMV_{—}1F3, S1R3B1_BMV_{—}1G11, S1R3A1_BMV_{—}1G4, S1R3B1_BMV_{—}1H11, S1R3A1_CS_{—}1B9, S1R3B1_BMV_{—}1H9, S1R3A1_CS_{—}1B10, S1R3B1_BMV_{—}1C12, S1R3C1_BMV_{—}1H11, S1R3B1_BMV_{—}1A10, S1R3A1_CS_{—}1D11, S1R3C1_DP47_{—}1H1, S1R3A1_CS_{—}1B12, S1R3B1_BMV_{—}1H5, S1R3A1_DP47_{—}1A6, S1R3B1_DP47_{—}1E1, S1R3B1_BMV_{—}1A1, S1R3B1_DP47_{—}3A2, S1R3A1_DP47_{—}11B7, S1R3A1_DP47_{—}11D1, S1R3A1_DP47_{—}7F3, S1R2B_DP47_{—}4E3, S1R3C1_DP47_{—}2G2, S1R3A1DP47_{—}11H6, S1R3A1_BMV_{—}3B1, S1R3A1_DP47_{—}6B9, S1R2A_CS_{—}10B8, S1R3A1_DP47_{—}7A6, S1R3B2_DP47_{—}2G3, S1R2B_CS_{—}6H11, S1R3A1_DP47_{—}10G1, S1R3A1_DP47_{—}7C1, S1R2A_DP47_{—}5D6, S1R3A1_DP47_{—}11F6, S1R3A1_DP47_{—}11D3, S1R3A1_CS_{—}8A8, S1R3A1_BMV_{—}5D10, S1R3A1_DP47_{—}11C1, S1R3A1_DP47_{—}4E1, S1R3A1_DP47_{—}10E1, S1R3A1_CS_{—}11C3, S1R3A1_CS_{—}13H11, S1R3A1_CS_{—}2D9, S1R2A_CS_{—}3D4, S1R3A1_DP47_{—}2H6, S1R3A1_DP47_{—}4G1, S1R2A_DP47_{—}3C1, S1R3A1_DP47_{—}7B2, S1R3B2_DP47_{—}4E2, S1R3A1_CS_{—}16C2, S1R3A1_CS_{—}11E5, S1R3A1_CS_{—}16D7, S1R2A_CS_{—}10B10, S1R3A1_CS_{—}15C2, S1R3A1_CS_{—}9C1, S1R2A_CS_{—}5A1, S1R2A_CS_{—}8C8, S1R3A1_CS_{—}13H5, S1R2B_CS_{—}5E9, S1R3A1_CS_{—}8F9, S1R3A1_CS_{—}14B5, S1R2A_CS_{—}9E10, S1R3A1_CS_{—}7A10, S1R3A1_BMV_{—}6H7, S1R3A1_CS_{—}12D1, S1R3A1_CS_{—}13D12, S1R3A1_CS_{—}7A8, S1R2A_CS_{—}2C9, S1R3A1_CS_{—}12D1, S1R2A_CS_{—}7D4, S1R3A1_CS_{—}15B8, S6R3_DP47_{—}1A10, S6R2_DP47_{—}1E11, S5R2_DP47_{—}1H11, S6R3_CS_{—}1G5, S6R2_DP47_{—}1H11, S5R3_DP47_{—}1A10, S5R2_DP47_{—}1D11, S5R2_CS_{—}1A8, S6R3_CS_{—}1B7, S6R2_CS_{—}1E5, S6R3_BMV_{—}1C2, S5R2_DP47_{—}1B10, S6R3_DP47_{—}1C12, S5R2_DP47_{—}1D10, and S6R3_DP47_{—}1H9.

17. The binding protein of claim 16, wherein the binding protein comprises:
(a) a VH domain having an amino acid sequence that is at least 95% identical to any one of SEQ ID NOS: 1, 3, 5, 7, 9, 11, 13, 15, 17, 19, 21, 23, 25, 27, 29, 31, 33, 35, 37, 39, 41, 43, 45, 47, 49, 51, 53, 55, 57, 59, 61, 65, 67, 251, 255, 259, 263, 267, 271, 275, 279, 283, 287, 291, 295, 299, 303, 307, 311, 315, 319, 323, 327, 331, 335, 339, 343, 347, 351, 355, 359, 363, 367, 371, 375, 379, 383, 387, 391, 395, 399, 403, 407, 411, 415, 419, 423, 427, 431, 435, 439, 443, 447, 451, 455, 459, 463, 467, 471, 475, 479, 483, 487, 491, 495, 499, 503, 507, 511, 515, 519 and 523; or
(b) a VL domain having an amino acid sequence that is at least 95% identical to any one of SEQ ID NOS: 2, 4, 6, 8, 10, 12, 14, 16, 18, 20, 22, 24, 26, 28, 30, 32, 34, 36, 38, 40, 42, 44, 46, 48, 50, 52, 54, 56, 58, 60, 62, 63, 64, 66, 68, 69, 70, 71, 72, 73, 74, 75, 76, 77, 78, 79, 80, 81, 82, 83, 84, 85, 86, 87, 88, 89, 90, 91, 92, 93, 94, 95, 253, 257, 261, 265, 269, 273, 277, 281, 285, 289, 293, 297, 301, 305, 309, 313, 317, 321, 325, 329, 333, 337, 341, 345, 349, 353, 357, 361, 365, 369, 373, 377, 381, 385, 389, 393, 397, 401, 405, 409, 413, 417, 421, 425, 429, 433, 437, 441, 445, 449, 453, 457, 461, 465, 469, 473, 477, 481, 485, 489, 493, 497, 501, 505, 509, 513, 517, 521 and 525; or
(c) a VH domain of (a) and a VL domain of (b); or
(d) VH and VL amino acid sequences that are at least 95% identical to the VH and VL amino acid sequences, respectively, in any one of S1R2A_CS_{—}1F7, S1R2A_CS_{—}1D11, S1R2C_CS_{—}1D3, S1R2C_CS_{—}1H12, S1R2A_CS_{—}1D3, S1R3B2_BMV_{—}1E1, S1R3C1_CS_{—}1D3, S1R3B2_DP47_{—}1E8, S1R3B2_BMV_{—}1G2, S1R3B2_BMV_{—}1H5, S1R3C1_CS_{—}1A6, S1R3B2_DP47_{—}1C9, S1R3B2_DP47_{—}1E10, S1R3C1_CS_{—}1B10, S1R3A1_BMV_{—}1F3, S1R3B1_BMV_{—}1G11, S1R3A1_BMV_{—}1G4, S1R3B1_BMV_{—}1H11, S1R3A1_CS_{—}1B9, S1R3B1_BMV_{—}1H9, S1R3A1_CS_{—}1B10, S1R3B1_BMV_{—}1C12, S1R3C1_BMV_{—}1H11, S1R3B1_BMV_{—}1A10, S1R3A1_CS_{—}1D11, S1R3C1_DP47_{—}1H1, S1R3A1_CS_{—}1B12, S1R3B1_BMV_{—}1H5, S1R3A1_DP47_{—}1A6, S1R3B1_DP47_{—}1E1, S1R3B1_BMV_{—}1A1, S1R3B1_DP47_{—}3A2, S1R3A1_DP47_{—}11B7, S1R3A1_DP47_{—}11D1, S1R3A1_DP47_{—}7F3, S1R2B_DP47_{—}4E3, S1R3C1_DP47_{—}2G2, S1R3A1_DP47_{—}11H6, S1R3A1_BMV_{—}3B1, S1R3A1_DP47_{—}6B9, S1R2A_CS_{—}10B8, S1R3A1_DP47_{—}7A6, S1R3B2_DP47_{—}2G3, S1R2B_CS_{—}6H11, S1R3A1_DP47_{—}10G1, S1R3A1_DP47_{—}7C1, S1R2A_DP47_{—}5D6, S1R3A1_DP47_{—}11F6, S1R3A1_DP47_{—}11D3, S1R3A1_CS_{—}8A8, S1R3A1_BMV_{—}5D10, S1R3A1_DP47_{—}1C1, S1R3A1_DP47_{—}4G1, S1R3A1_DP47_{—}10E1, S1R3A1_CS_{—}11C3, S1R3A1_CS_{—}13H11, S1R3A1_CS_{—}2D9, S1R2A_CS_{—}3D4, S1R3A1_DP47_{—}2H6, S1R3A1_DP47_{—}4G1, S1R2A_DP47_{—}3C1, S1R3A1_DP47_{—}7B2, S1R3B2_DP47_{—}4E2, S1R3A1_CS_{—}16C2, S1R3A1_CS_{—}11E5, S1R3A1_CS_{—}16D7, S1R2A_CS_{—}10B10, S1R3A1_CS_{—}15C2, S1R3A1_CS_{—}9C1, S1R2A_CS_{—}5A1, S1R2A_CS_{—}8C8, S1R3A1_CS_{—}13H5, S1R2B_CS_{—}5E9, S1R3A1_CS_{—}8F9, S1R3A1_CS_{—}14B5, S1R2A_CS_{—}9E10, S1R3A1_CS_{—}7A10, S1R3A1_BMV_{—}6H7, S1R3A1_CS_{—}12A11, S1R3A1_CS_{—}13D12, S1R3A1_CS_{—}7A8, S1R2A_CS_{—}2C9, S1R3A1_CS_{—}12D1, S1R2A_CS_{—}7D4, S1R3A1_CS_{—}15B8, S6R3_DP47_{—}1A10, S6R2_DP47_{—}1E11, S5R2_DP47_{—}1H11, S6R3_CS_{—}1G5, S6R2_DP47_{—}1H11, S5R3_DP47_{—}1A10, S5R2_DP47_{—}1D11, S5R2_CS_{—}1A8, S6R3_CS_{—}1B7, S6R2_CS_{—}1E5, S6R3_BMV_{—}1C2, S5R2_DP47_{—}1B10, S6R3_DP47_{—}1C12, S5R2_DP47_{—}1D10, and S6R3_DP47_{—}1H9.

18. The binding protein of claim 16, wherein the binding protein comprises:
(a) a VH domain having the amino acid sequence of any one of SEQ ID NOS: 1, 3, 5, 7, 9, 11, 13, 15, 17, 19, 21, 23, 25, 27, 29, 31, 33, 35, 37, 39, 41, 43, 45, 47, 49, 51, 53, 55, 57, 59, 61, 65 or 67, 251, 255, 259, 263, 267, 271, 275, 279, 283, 287, 291, 295, 299, 303, 307, 311, 315, 319, 323, 327, 331, 335, 339, 343, 347, 351, 355, 359, 363, 367, 371, 375, 379, 383, 387, 391, 395, 399, 403, 407, 411, 415, 419, 423, 427, 431, 435, 439, 443, 447, 451, 455, 459, 463, 467, 471, 475, 479, 483, 487, 491, 495, 499, 503, 507, 511, 515, 519 and 523; or
(b) a VL domain having the amino acid sequence of any one of SEQ ID NOS: 2, 4, 6, 8, 10, 12, 14, 16, 18, 20, 22, 24, 26, 28, 30, 32, 34, 36, 38, 40, 42, 44, 46, 48, 50, 52, 54, 56, 58, 60, 62, 63, 64, 66, 68, 69, 70, 71, 72, 73, 74, 75, 76, 77, 78, 79, 80, 81, 82, 83, 84, 85, 86, 87, 88, 89, 90, 91, 92, 93, 94, 95, 253, 257, 261, 265, 269, 273, 277, 281, 285, 289, 293, 297, 301, 305, 309, 313, 317, 321, 325, 329, 333, 337, 341, 345, 349, 353, 357, 361, 365, 369, 373, 377, 381, 385, 389, 393, 397, 401, 405, 409, 413, 417, 421, 425, 429, 433, 437, 441, 445, 449, 453, 457, 461, 465, 469, 473, 477, 481, 485, 489, 493, 497, 501, 505, 509, 513, 517, 521 and 525; or
(c) a VH domain of (a) and a VL domain of (b); or
(d) VH and VL amino acid sequences of the VH and VL amino acid sequences, respectively, in any one of S1R2A_CS_{—}1F7, S1R2A_CS_{—}1D11, S1R2C_CS_{—}1D3, S1R2C_CS_{—}1H12, S1R2A_CS_{—}1D3, S1R3B2_BMV_{—}1E1, S1R3C1_CS_{—}1D3, S1R3B2_DP47_{—}1E8, S1R3B2_BMV_{—}1G2, S1R3B2_BMV_{—}1H5, S1R3C1_CS_{—}1A6, S1R3B2_DP47_{—}1C9, S1R3B2_DP47_{—}1E10, S1R3C1_CS_{—}1B10, S1R3A1_BMV_{—}1F3, S1R3B1_BMV_{—}1G11, S1R3A1_BMV_{—}1G4, S1R3B1_BMV_{—}1H11, S1R3A1_CS_{—}1B9, S1R3B1_BMV_{—}1H9, S1R3A1_CS_{—}1B10, S1R3B1_BMV_IC₁₂, S1R3C1_BMV_{—}1H11, S1R3B1_BMV_{—}1A10, S1R3A1_CS_{—}1D11, S1R3C1_DP47_{—}1H1, S1R3A1_CS_{—}1B12, S1R3B1_BMV_{—}1H5, S1R3A1_DP47_{—}1A6, S1R3B1_DP47_{—}1E1, S1R3B1_BMV_{—}1A1, S1R3B1_DP47_{—}3A2, S1R3A1_DP47_{—}11B7, S1R3A1_DP47_{—}11D1, S1R3A1_DP47_{—}7F3, S1R2B_DP47_{—}4E3, S1R3C1_DP47_{—}2G2, S1R3A1_DP47_{—}11H6, S1R3A1_BMV_{—}3B1, S1R3A1_DP47_{—}6B9, S1R2A_CS_{—}110B8, S1R3A1_DP47_{—}7A6, S1R3B2_DP47_{—}2G3, S1R2B_CS_{—}6H11, S1R3A1_DP47_{—}10G1, S1R3A1_DP47_{—}7C1, S1R2A_DP47_{—}5D6, S1R3A1_DP47_{—}11F6, S1R3A1_DP47_{—}11D3, S1R3A1_CS_{—}8A8, S1R3A1_BMV_{—}5D10, S1R3A1_DP47_{—}11C1, S1R3A1_DP47_{—}4E1, S1R3A1_DP47_{—}10E1, S1R3A1_CS_{—}11C3, S1R3A1_CS_{—}13H11, S1R3A1_CS_{—}2D9, S1R2A_CS_{—}3D4, S1R3A1_DP47_{—}2H6, S1R3A1_DP47_{—}4G1, S1R2A_DP47_{—}3C1, S1R3A1_DP47_{—}7B2, S1R3B2_DP47_{—}4E2, S1R3A1_CS_{—}16C2, S1R3A1_CS_{—}11E5, S1R3A1_CS_{—}16D7, S1R2A_CS_{—}10B10, S1R3A1_CS_{—}15C2, S1R3A1_CS_{—}9C1, S1R2A_CS_{—}5A1, S1R2A_CS_{—}8C8, S1R3A1_CS_{—}13H5, S1R2B_CS_{—}5E9, S1R3A1_CS_{—}8F9, S1R3A1_CS_{—}14B5, S1R2A_CS_{—}9E10, S1R3A1_CS_{—}7A10, S1R3A1_BMV_{—}6H7, S1R3A1_CS_{—}12A11, S1R3A1_CS_{—}13D12, S1R3A1_CS_{—}7A8, S1R2A_CS_{—}2C9, S1R3A1_CS_{—}12D1, S1R2A_CS_{—}7D4, S1R3A1_CS_{—}15B8, S6R3_DP47_{—}1A10, S6R2_DP47_{—}1E11, S5R2_DP47_{—}1H11, S6R3_CS_{—}1G5, S6R2_DP47_{—}1H11, S5R3_DP47_{—}1A10, S5R2_DP47_{—}1D11, S5R2_CS_{—}1A8, S6R3_CS_{—}1B7, S6R2_CS_{—}1E5, S6R3_BMV_{—}1C2, S5R2_DP47_{—}1B10, S6R3_DP47_{—}1C12, S5R2_DP47_{—}1D10, and S6R3_DP47_{—}1H9.

19. The binding protein of claim 14 or 16, which is a SMIP.

20. A SMIP comprising an amino acid sequence that is at least 90% identical to the amino acid sequence of any one of SEQ ID NOS: 159, 173, 175, 177, 179, 181, 183, 185, 187, 189, 191, 193, 195, 197, 199, 201, 203, 205, 207, 209, 211, 213, 215, 217, 219, 221, 223, 225, 227, 229, 231, 233, 534, 536, 538, 540, 542, 544, 546, 548, 550, 552, 554, 556, 558, 560, 562, 564, 566, 568, 570, 572, 574, 576, 578, 580, 582, 584, 586, 588, 590, 592, 594, 596, 598, 600, 602, 604, 606, 608, 610, 612, 614, 616, 618, 620, 622, 624, 626, 628, 630, 632, 634, 636, 638, 640, 642, 644, 646, 648, 650, 652, 654, 656, 658, 660, 662, 664, 666, 668 and 670, excluding the leader sequence.

21. The SMIP of claim 20, comprising an amino acid sequence that is at least 95% identical to the amino acid sequence of any one of SEQ ID NOS: 159, 173, 175, 177, 179, 181, 183, 185, 187, 189, 191, 193, 195, 197, 199, 201, 203, 205, 207, 209, 211, 213, 215, 217, 219, 221, 223, 225, 227, 229, 231, 233, 534, 536, 538, 540, 542, 544, 546, 548, 550, 552, 554, 556, 558, 560, 562, 564, 566, 568, 570, 572, 574, 576, 578, 580, 582, 584, 586, 588, 590, 592, 594, 596, 598, 600, 602, 604, 606, 608, 610, 612, 614, 616, 618, 620, 622, 624, 626, 628, 630, 632, 634, 636, 638, 640, 642, 644, 646, 648, 650, 652, 654, 656, 658, 660, 662, 664, 666, 668 and 670, excluding the leader sequence.

22. The SMIP of claim 20, comprising the amino acid sequence of any one of SEQ ID NOS: 159, 173, 175, 177, 179, 181, 183, 185, 187, 189, 191, 193, 195, 197, 199, 201, 203, 205, 207, 209, 211, 213, 215, 217, 219, 221, 223, 225, 227, 229, 231, 233, 534, 536, 538, 540, 542, 544, 546, 548, 550, 552, 554, 556, 558, 560, 562, 564, 566, 568, 570, 572, 574, 576, 578, 580, 582, 584, 586, 588, 590, 592, 594, 596, 598, 600, 602, 604, 606, 608, 610, 612, 614, 616, 618, 620, 622, 624, 626, 628, 630, 632, 634, 636, 638, 640, 642, 644, 646, 648, 650, 652, 654, 656, 658, 660, 662, 664, 666, 668 and 670, excluding the leader sequence.

23. The SMIP according to claim 20, that specifically binds a polypeptide selected from the group consisting of:
(a) a polypeptide comprising the amino acid sequence as set forth in SEQ ID NO. 242;
(b) a polypeptide comprising the amino acid sequence as set forth in SEQ ID NO. 243;
(c) a polypeptide comprising the amino acid sequence as set forth in SEQ ID NO. 244;
(d) a polypeptide comprising the amino acid sequence as set forth in SEQ ID NO. 245; and
(e) a polypeptide comprising the amino acid sequence as set forth in SEQ ID NO. 671.

24. The SMIP according to claim 20, that specifically binds ERBB2 in a region selected from the group consisting of:
(a) a region of the extracellular domain comprising the amino acid sequence ASPLTS;
(b) a region of the extracellular domain comprising the amino acid sequence EQRASPLTS; and
(c) a region of the extracellular domain comprising the amino acid sequence EQRASPLTSIIS.

25. A nucleic acid molecule encoding the SMIP of claim 20.

26. A nucleic acid molecule that encodes a binding protein that specifically binds ErbB2, wherein the nucleic acid molecule comprises a nucleotide sequence selected from:
(a) the nucleotide sequence of any one of SEQ ID NOS: 96, 98, 100, 102, 104, 106, 108, 110, 112, 114, 116, 118, 120, 122, 124, 126, 128, 130, 132, 134, 136, 138, 140, 142, 144, 146, 148, 150, 152, 154, 156; 252, 256, 260, 264, 268, 272, 276, 280, 284, 288, 292, 296, 300, 304, 308, 312, 316, 320, 324, 328, 332, 336, 340, 344, 348, 352, 356, 360, 364, 368, 372, 376, 380, 384, 388, 392, 396, 400, 404, 408, 412, 416, 420, 424, 428, 432, 436, 440, 444, 448, 452, 456, 460, 464, 468, 472, 476, 480, 484, 488, 492, 496, 500, 504, 508, 512, 516, 520 or 524; or
(b) the nucleotide sequence of any one of SEQ ID NOS: 97, 99, 101, 103, 105, 107, 109, 111, 113, 115, 117, 119, 121, 123, 125, 127, 129, 131, 133, 135, 137, 139, 141, 143, 145, 147, 149, 151, 153, 155, 157; 254, 258, 262, 266, 270, 274, 278, 282, 286, 290, 294, 298, 302, 306, 310, 314, 318, 322, 326, 330, 334, 338, 342, 346, 350, 354, 358, 362, 366, 370, 374, 378, 382, 386, 390, 394, 398, 402, 406, 410, 414, 418, 422, 426, 430, 434, 438, 442, 446, 450, 454, 458, 462, 466, 470, 474, 478, 482, 486, 490, 494, 498, 502, 506, 510, 514, 518, 522, or 526; or
(c) both the nucleotide sequence of (a) and the nucleotide sequence of (b).

27. The nucleic acid molecule of claim 26, comprising the nucleotide sequence of any one of SEQ ID NOS: 158, 172, 174, 176, 178, 180, 182, 184, 186, 188, 190, 192, 194, 196, 198, 200, 202, 204, 206, 208, 210, 212, 214, 216, 218, 220, 222, 224, 226, 228, 230,r 232, 533, 535, 537, 539, 541, 543, 545, 547, 549, 551, 553, 555, 557, 559, 561, 563, 565, 657, 569, 571, 573, 575, 577, 579, 581, 583, 585, 587, 589, 591, 593, 595, 597, 599, 601, 603, 605, 607, 609, 611, 613, 615, 617, 619, 621, 623, 625, 627, 629, 631, 633, 635, 637, 639, 641, 643, 645, 647, 649, 651, 653, 655, 657, 659, 661, 663, 665, 667 and 669.

28. A composition comprising SMIP of claim 20.

29. The composition of claim 28, further comprising an additional therapeutic or diagnostic agent.

30. A composition comprising two or more SMIPS of claim 20.

31. The composition of claim 30, wherein the two or more SMIPS do not cross-block each other for binding to ErbB2.

32. The composition of claim 29 that comprises an additional therapeutic agent, wherein the therapeutic agent is a chemotherapeutic or anti-inflammatory agent.

33. A host cell comprising a nucleic acid molecule of claim 26.

34. The host cell of claim 33 selected from the group consisting of an HEK cell, an NSO cell and a CHO cell.

35. A method for producing a binding molecule that specifically binds ErbB2, or a SMIP that specifically binds ErbB2, comprising the step of culturing the host cell of claim 33 under conditions the permit protein expression.

36. A method for reducing ErbB2-mediated proliferation of a cancer cell comprising the step of administering to a subject or mammal in need thereof an effective amount of the composition of claim 28.

37. A method for reducing tumor growth of an ErbB2-expressing tumor, comprising administering to a subject or mammal in need thereof an effective amount of the composition of claim 28.

38. A method for increasing apoptosis in an ErbB2-expressing tumor, comprising administering to a subject or mammal in need thereof an effective amount of the composition of claim 28.

39. The method of claim 36 or 37, further comprising administering a chemotherapeutic agent.

40. The method of claim 39, wherein the chemotherapeutic agent is selected from the group consisting of: Taxol, Doxorubicin, Gemcitabine and Cisplatin.

41. A method for reducing ErbB2 ectodomain shedding in an ErbB2-expressing cell comprising the step of contacting the cell with a SMIP of claim 20.

42. A method for reducing the amount of cell surface ErbB2 in a cell comprising the step of contacting the cell with a SMIP of claim 20.

43. The binding protein of claim 1, which is detectably labeled.

44. A method for detecting an ErbB2 expressing tumor in a subject, comprising administering the binding protein of claim 43.

45. A method for detecting ErbB2 in a sample from a subject comprising the step of contacting the sample with a binding protein of claim 14 or 16, or a SMIP of claim 20 under conditions that permit binding and detecting binding, wherein binding indicates the presence of ErbB2.

46. A method of treating cancer characterized by ErbB2 expression comprising administering to a mammal or subject in need thereof an effective amount of a SMIP of claim 20.

The application's sequence listing, which the Patent Office published only in electronic form, follows.

SEQUENCE LISTING (783 sequences)

SEQ ID NO: 1 - protein, 120 aa, Artificial Sequence
  source: /note="Description of Artificial Sequence: Synthetic polypeptide"
EVQLVQSGAEVKKPGASVKVSCKASGYTFTGYYMHWVRQAPGQGLEWMGWINPNSGGTNYAQKFQGWVTMTRDTSISTAYMELSRLRSDDTAVYYCARDSTMAPGAFDIWGRGTLVTVSS

SEQ ID NO: 2 - protein, 110 aa, Artificial Sequence
  source: /note="Description of Artificial Sequence: Synthetic polypeptide"
QSVLTQPPSVSVAPGQTARMTCGGNNIESKTVHWYQQKPGQAPVLVVYNDNVRPSGIPARFSGSNSGNTATLTINRVEAGDEADYYCQVWDSSRDQGVFGGGTKLTVLGA

SEQ ID NO: 3 - protein, 118 aa, Artificial Sequence
  source: /note="Description of Artificial Sequence: Synthetic polypeptide"
EVQLVQSGSEVRRPGSSVRVSCTASGDTSSSFTVNWLRQAPGQGLEWMGGITPMFGTANYAQMFEDRVTITADEMELSGLTSEDTAVYFCATGPSDYVWGSYRFLDTWGRGTTVTVSS

SEQ ID NO: 4 - protein, 112 aa, Artificial Sequence
  source: /note="Description of Artificial Sequence: Synthetic polypeptide"
QAVLTQPSSVSAAPGQEVSISCSGARSNVGGNYVSWYQHLPGTAPKLLIYDNNKRPSGMPDRFSGSKSGTSATLGITGVQTEDEADYYCATWDSSLSAVVFGGGTKLTVLGA

SEQ ID NO: 5 - protein, 118 aa, Artificial Sequence
  source: /note="Description of Artificial Sequence: Synthetic polypeptide"
QVQLVQSGSEVRRPGSSVRISCTASGDTSSSFTVNWVRQAPGQGLEWMGGITPMFGTANYAQVFEDRVTIIADEMELSGLTSEDTAVYFCATGPSDYVWGSYRFLDRWGRGTLVTVSS

SEQ ID NO: 6 - protein, 112 aa, Artificial Sequence
  source: /note="Description of Artificial Sequence: Synthetic polypeptide"
QSVLTQPPSVSAAPGQKVTISCSGGRSSIGNNYVSWYQHLPGTAPKLLIYDNNQRPSGIPDRFSGSKSGTSATLGITGLQTGDEADYYCGTWDSSLSAVVFGGGTKVTVLGA

SEQ ID NO: 7 - protein, 117 aa, Artificial Sequence
  source: /note="Description of Artificial Sequence: Synthetic polypeptide"
EVQLVETGGGLVQPGGSLRLSCAASGFTFSSYGMNWVRQAPGKGLEWVSYISSSGNTIFYADSVKGRFTISRDSAKNSVSLQMNSLRDEDTAVYYCASYYSYYYGMDAWGQGTMVTV

SEQ ID NO: 8 - protein, 112 aa, Artificial Sequence
  source: /note="Description of Artificial Sequence: Synthetic polypeptide"
SYVLTQPPSASGTPGQRVTISCSGSSSNIGSNTVNWYQQLPGTAPKLLIYSNNQRPSGVPDRFSGSKSGTSASLAISGLRSEDEADYYCAAWDYSLSGWVFGGGTKVTVLGA

SEQ ID NO: 9 - protein, 122 aa, Artificial Sequence
  source: /note="Description of Artificial Sequence: Synthetic polypeptide"
EVQLVQSGAEVKKPGASVKVSCKASGYSFTAFYIHWVRQAPGQGLEYLGWIDPNTGATKYAQRFQGRVIMTWDTSITTATMELSRLTSDDSAVYYCVRDLREWGYELSVEYWGRGTLVTVSS

SEQ ID NO: 10 - protein, 112 aa, Artificial Sequence
  source: /note="Description of Artificial Sequence: Synthetic polypeptide"
QSVLTQPPSASGTPGQRVTISCSGSSSNIGSNYVYWYQQLPGTAPKLLIYRNNQRPSGVPDRFSGSKSGTSASLAISGLRSEDEADYYCAAWDDSLSGWVFGGGTKLTVLGA

SEQ ID NO: 11 - protein, 115 aa, Artificial Sequence
  source: /note="Description of Artificial Sequence: Synthetic polypeptide"
EVQLVETGGGVVQPGGSLSLSCAASGFTFSSYGMQWVRQAPGKGLEWVAFIRYDGSSEYYADSVKGRFTISRDNSKNTLYLQMNSLRAEDTAVYYCGRTLESSLWGKGTLVTVSS

SEQ ID NO: 12 - protein, 112 aa, Artificial Sequence
  source: /note="Description of Artificial Sequence: Synthetic polypeptide"
QSVLTQPPSVSAAPGQKVTISCSGSTSNIGNNYVSWYQQHPGKAPKLMIYDVSKRPSGVPDRFSGSKSGNSASLDISGLQSEDEADYYCAAWDDSLSEFLFGTRTKLTVLGA

SEQ ID NO: 13 - protein, 118 aa, Artificial Sequence
  source: /note="Description of Artificial Sequence: Synthetic polypeptide"
QVQLQESGPGLVKPSQTLSLTCGISGDSVSSNSAAWNWIRQSPTRGLEWLGRTYYRSSWYHNYAPSMNSRLTIIADTSKNQFSLQLNSVTPEDTAVYYCASGWAFDVWGRGTLVTVSS

SEQ ID NO: 14 - protein, 112 aa, Artificial Sequence
  source: /note="Description of Artificial Sequence: Synthetic polypeptide"
QSVLTQPPSASGSPGQSVTISCTGTSSDVGAYDFVSWYQQHPGKAPKLMIYEVNKRPSGVPDRFSGSKSGNTASLTVSGLQAEDEADYYCSSYAGSKNLLFGGGTKLTVLGA

SEQ ID NO: 15 - protein, 119 aa, Artificial Sequence
  source: /note="Description of Artificial Sequence: Synthetic polypeptide"
EVQLLESGGGLVQPGGSLRLSCAASGFTFSSYAMSWVRQAPGKGLEWVSAISGSGGSTYYADSVKGRFTISRDNSKNTLYLQMNSLRAEDTAVYYCARQSGADWYFDLWGRGTLVTVSS

SEQ ID NO: 16 - protein, 113 aa, Artificial Sequence
  source: /note="Description of Artificial Sequence: Synthetic polypeptide"
QAVLTQPSAVSGAPGQRVTISCTGTSSNIGTNYLVHWYQQRPGTAPQLLVSGNNTRPSGVTDRFSVSKSATSASLAITGLQAEDEADYYCQTYDINLRVWVFGGGTKVTVLGA

SEQ ID NO: 17 - protein, 125 aa, Artificial Sequence
  source: /note="Description of Artificial Sequence: Synthetic polypeptide"
QVQLVQSGAEVKKPGSSVKVSCKASGYTFTSYGISWVRQAPGQGLEWMGWISAYNGNTNYAQKLQGRVTMTTDTSTSTAYMELRSLRSDDTAVYYCARVPGVSGSYPDYYYMDVWGKGTLVTVSS

SEQ ID NO: 18 - protein, 109 aa, Artificial Sequence
  source: /note="Description of Artificial Sequence: Synthetic polypeptide"
DIQMTQSPSTLSASIGDRVTITCRASEGIYHWLAWYQQKPGKAPKLLIYKASSLASGAPSRFSGSGSGTDFTLTISSLQPDDFATYYCQQYSNYPLTFGGGTKLEIKRA

SEQ ID NO: 19 - protein, 120 aa, Artificial Sequence
  source: /note="Description of Artificial Sequence: Synthetic polypeptide"
EVQLVQSGGGLVRPGGSLRLSCAASGFSFSDYYMTWIRQIPGKGLEWVAVIWNDGSDRYYADSVKGRFTISRDNSKNTLFLQMSSLRDEDTALYYCVRGGPTASSGFDYWGRGTLVTVSS

SEQ ID NO: 20 - protein, 112 aa, Artificial Sequence
  source: /note="Description of Artificial Sequence: Synthetic polypeptide"
SSELTQPASVSGSPGQSITISCTGTSSDVGGYNYVSWYLQHPGKAPKLMIYEGSKRPSGVSNRFSGSKSGNTASLTISGLQAEDEADYYCSSYTTRSTRVFGGGTKLTVLGA

SEQ ID NO: 21 - protein, 119 aa, Artificial Sequence
  source: /note="Description of Artificial Sequence: Synthetic polypeptide"
EVQLVQSGAEVKKPGESLKISCKGFGYNFRSAWIGWVRQMPGKGLEWMGVIYPGDSDVRYSPSFQGQVTISADKSISTAYLQWSSLKASDTAMYYCTRPVGQWVDSDYWGKGTLVTVSS

SEQ ID NO: 22 - protein, 112 aa, Artificial Sequence
  source: /note="Description of Artificial Sequence: Synthetic polypeptide"
QSVLTQPPSASGTPGQRVTISCSGSSSNIGTNTVNWYQQLPGTAPKLLIYTSNQRPSGVPARFSASNSGTSASLAISGLRSEDEADYYCAAWDDKLSGAVFGGGTKLTVLGA

SEQ ID NO: 23 - protein, 120 aa, Artificial Sequence
  source: /note="Description of Artificial Sequence: Synthetic polypeptide"
EVQLLESGGGLVQPGGSLRLSCAASGFTFSSYAMSWVRQAPGKGLEWVSAISGSGGSTYYADSVKGRFTISRDNSKNTLYLQMNSLRAEDTAVYYCARWRPLLDYHFDQWGQGTMVTVSS

SEQ ID NO: 24 - protein, 112 aa, Artificial Sequence
  source: /note="Description of Artificial Sequence: Synthetic polypeptide"
QSVLTQPPSASGTPGQTVTISCSGSSSNIGSSVVNWYQQFPGTAPKVLVYSNTQRPSGVPDRFSGSRSGTSASLAISGLQSEDEADYYCLAWDASLNGWVFGGGTKLTVLGA

SEQ ID NO: 25 - protein, 119 aa, Artificial Sequence
  source: /note="Description of Artificial Sequence: Synthetic polypeptide"
EVQLLESGGGLVQPGGSLRLSCAASGFTFSSYAMSWVRQAPGKGLEWVSAISGSGGSTYYADSVKGRFTISRDNSKNTLYLQMNSLRAEDTAVYYCARGYSGYDDPDSWGRGTTVTVSS

SEQ ID NO: 26 - protein, 112 aa, Artificial Sequence
  source: /note="Description of Artificial Sequence: Synthetic polypeptide"
HVILTQPPSTSGTPGQTVTISCSGSSSNIGSHYVYWYQQLPGTAPKLLIYRNNQRPSGVPDRFSGSKSGTSASLAISGLRSEDETDYYCAAWDDSLSGRVFGTGTKLTVLGA

SEQ ID NO: 27 - protein, 114 aa, Artificial Sequence
  source: /note="Description of Artificial Sequence: Synthetic polypeptide"
QVQLQQSGAEVKKPGSSVKVSCKASGGTISNYAISWVRLAPGQGLEWMGSIVPLHGTTNFAQKFQGRVTITADESTSTSYMEVNVLTYEDTAMYYCASLNWGYWGRGTLVTVSS

SEQ ID NO: 28 - protein, 111 aa, Artificial Sequence
  source: /note="Description of Artificial Sequence: Synthetic polypeptide"
NFMLTQPHSVSESPGKTVTISCTGSSGSIASNYVQWYQQRPDSAPTTVIYEDNRRSSGVPDRFSGSIDSNSASLSISGLKTEDEADYYCQSYDSSGHVVFGGGTKLTVLGA

SEQ ID NO: 29 - protein, 120 aa, Artificial Sequence
  source: /note="Description of Artificial Sequence: Synthetic polypeptide"
EVQLVESGEGLVKPGGSLRLSCTASGFTFRSYSLNWVRQAPGQGLEWVSSISSTSTYIYYADSVKGRFTISRDDAKNTLYLQMNSLRAEDTAAYYCVRLGSGGGYFPDYWGRGTLVTVSS

SEQ ID NO: 30 - protein, 110 aa, Artificial Sequence
  source: /note="Description of Artificial Sequence: Synthetic polypeptide"
SSELTQDPAVSVALGQTVRITCQGDSLRSYYASWYQQKPGQAPVLVIYGKNNRPSGIPDRFSGSSSGNTASLTITGAQAEDEADYYCNSRDSSGNHVVFGGGTKLTVLGA

SEQ ID NO: 31 - protein, 114 aa, Artificial Sequence
  source: /note="Description of Artificial Sequence: Synthetic polypeptide"
QVQLVQSGGGLVQPGGSLRLSCAASGFTFSTYAMSWARQAPGKGLEWVSSISGDGGRILDADSAKGRFTISRDNSKNTLYLQMNGLRVEDTALYYCARADGNYWGRGTMVTVSS

SEQ ID NO: 32 - protein, 112 aa, Artificial Sequence
  source: /note="Description of Artificial Sequence: Synthetic polypeptide"
QSVLTQPASVSGSPGQSITISCTGTSSDVGGYNYVSWYQQHPGKAPKLMIYEGSKRPSGVSNRFSGSKSGNTASLTISGLQAEDEADYYCSSYTTRSTRVFGGGTKLTVLGA

SEQ ID NO: 33 - protein, 121 aa, Artificial Sequence
  source: /note="Description of Artificial Sequence: Synthetic polypeptide"
QVQLVESGAEVKKPGASVKVSCKASGYTFTSYDINWVRQAPGQRLEWMGWINAGNGNTKYSQKFQGRVTITRDTSASTAYMELRSLRSDDTAVYYCARGRSYGHPYYFDYWGQGTLVTVSS

SEQ ID NO: 34 - protein, 112 aa, Artificial Sequence; identical to SEQ ID NO: 32
  source: /note="Description of Artificial Sequence: Synthetic polypeptide"

SEQ ID NO: 35 - protein, 118 aa, Artificial Sequence
  source: /note="Description of Artificial Sequence: Synthetic polypeptide"
EVQLVQSGGGLVKPGGSLRLSCAASGFTFSSYGMHWVRQAPGKGLEWVAGIFYDGGNKYYADSVKGRFTISRDNSKNTLYLQMNSLRAEDTAVYYCARDRGYYYMDVWGKGTTVTVSS

SEQ ID NO: 36 - protein, 113 aa, Artificial Sequence
  source: /note="Description of Artificial Sequence: Synthetic polypeptide"
QSVLTQPPSVSGAPGQRVTISCTGRSSNIGAGHDVHWYQQLPGTAPKLLIYGDSNRPSGVPDRFSGSRSGTSASLAITGLQAEDEADYYCQSYDSSLRGSVFGGGTKVTVLGA

SEQ ID NO: 37 - protein, 123 aa, Artificial Sequence
  source: /note="Description of Artificial Sequence: Synthetic polypeptide"
KVQLVQSGTEVKKPGESLKISCQGSGYRFSSDWIAWVRQMPGKGLEWMGIVYPGDSDTRYSPSFQGQVTISADKSISTAYLQWSGLKASDTAKYYCARVQQAVGAKGYAMDVWGKGTLVTVSS

SEQ ID NO: 38 - protein, 112 aa, Artificial Sequence
  source: /note="Description of Artificial Sequence: Synthetic polypeptide"
QTVVIQEPSFSVSPGGTVTLTCGLSSGSVSTSYYPSWYRQTPGQAPHTLIHNTKIRSSGVPDRFSGSILGNNAALTITGAQADDESDYYCLLYMGSGIYVFGGGTKLTVLGA

SEQ ID NO: 39 - protein, 122 aa, Artificial Sequence
  source: /note="Description of Artificial Sequence: Synthetic polypeptide"
QVQLQESGAGLVKPSGTLSLTCAVSGGSISSGNWWSWVRQPPGKGLEWIGEISHSGSTNYNPSLKSRVTISVDKSKNQFSLNLSSVTAADTAVYYCARVRGTVGDTRGPDYWGQGTLVTVSS

SEQ ID NO: 40 - protein, 110 aa, Artificial Sequence; identical to SEQ ID NO: 30
  source: /note="Description of Artificial Sequence: Synthetic polypeptide"

SEQ ID NO: 41 - protein, 124 aa, Artificial Sequence
  source: /note="Description of Artificial Sequence: Synthetic polypeptide"
EVQLVQSGAEVKKPGASVRVSCKGSGNTFTGHYIHWVRQAPGQGLEWLGWIDPNTGDIQYSENFKGSVTLTRDPSINSVFMDLIRLTSDDTAMYYCAREGAGLANYYYYGLDVWGRGTMVTVSS

SEQ ID NO: 42 - protein, 111 aa, Artificial Sequence
  source: /note="Description of Artificial Sequence: Synthetic polypeptide"
QTVVLQEPSFSVSPGGTVTLTCGLNFGSVSTAYYPSWYQQTPGQAPRTLIYGTNIRSSGVPDRFSGSIVGNKAALTITGAQTEDESDYYCALYMGSGMLFGGGTKVTVLGA

SEQ ID NO: 43 - protein, 123 aa, Artificial Sequence
  source: /note="Description of Artificial Sequence: Synthetic polypeptide"
EVQLVQSGGGVVQPGRSLRLSCAASGFTFSSYGMHWVRQAPGKGLEWVAVISYDGSIKYYADSVKGRFTISRDNSKNTLYLQMNSLRAEDTAVYYCARTGEYSGYDTSGYSNWGQGTLVTVSS

SEQ ID NO: 44 - protein, 111 aa, Artificial Sequence
  source: /note="Description of Artificial Sequence: Synthetic polypeptide"
QSVLTQPPSASGTPGQRVTISCSGSSSNIGSNTVNWYQRLPGAAPQLLIYNNDQRPSGIPDRFSGSKSGTSGSLVISGLQSEDEADYYCASWDDSLNGRVFGGGTKLTVLG

SEQ ID NO: 45 - protein, 121 aa, Artificial Sequence
  source: /note="Description of Artificial Sequence: Synthetic polypeptide"
GVQLVESGGGLVKPGGSLRLSCAASGFTFSSYNMNWVRQAPGKGLEWVSAISGSGGSTYYADSVTGRFTISRDNSKNTLYLQMNSLRAEDTAVYYCAKDTSGWYGDGMDVWGRGTLVTVSS

SEQ ID NO: 46 - protein, 109 aa, Artificial Sequence; identical to SEQ ID NO: 18
  source: /note="Description of Artificial Sequence: Synthetic polypeptide"

SEQ ID NO: 47 - protein, 124 aa, Artificial Sequence
  source: /note="Description of Artificial Sequence: Synthetic polypeptide"
QMQLVQSGGGVVQPGRSLRLSCAASGFTFSSYGMHWVRQAPGKGLEWVAVISYDGSIKYYADSVKGRFTISRDNSKNTLYLQMNSLRAEDTGVYYCSKDRYSSGWYSSDAFDIWGRGTMVTVSS

SEQ ID NO: 48 - protein, 110 aa, Artificial Sequence
  source: /note="Description of Artificial Sequence: Synthetic polypeptide"
SSELTQDPAVSVALGQTVRITCQGDSLRSYYASWYQQKPGQAPVLVIYGKNNRPSGIPDRFSGSSSGNTASLTITGAQAEDEADYYCHSRDSSGNHVLFGGGTKLTVLGA

SEQ ID NO: 49 - protein, 128 aa, Artificial Sequence
  source: /note="Description of Artificial Sequence: Synthetic polypeptide"
EVQLVQSGAEVKKPGESLKISCKGSGYTFTNHWIAWVRQMPGKGLEWMGIIYPGDSETRYSPSFQGHVTISADKSISTAYLQWSTLKDSDSAMYFCVRQARGWDDGRAGYYYSGMDAWGQGTLVTVSS

SEQ ID NO: 50 - protein, 112 aa, Artificial Sequence
  source: /note="Description of Artificial Sequence: Synthetic polypeptide"
QAVVLQEPSFSVSPGGTVTLTCGLRSGSVSTSHYPSWYQQTPGQAPRTLIYSTNTRSSGVPDRFSGSILGNKAALTITGAQADDESNYYCMLYMGSGMYVFGGGTKVTVLGA

SEQ ID NO: 51 - protein, 120 aa, Artificial Sequence
  source: /note="Description of Artificial Sequence: Synthetic polypeptide"
EVQLLESGGGLVQPGGSLRLSCAASGFTFSSYAMSWVRQAPGKGLEWVSAISGSGGSTYYADSVKGRFTISRDNSKNTLYLQMNSLRAEDTAVYYCARVSGSHFPFFDSWGQGTMVTVSS

SEQ ID NO: 52 - protein, 110 aa, Artificial Sequence
  source: /note="Description of Artificial Sequence: Synthetic polypeptide"
QSVLTQPPSVSVAPGQTARITCGGDKIGHKSVHWYQQKPGQAPVLLVYDDRKRPSGIPERFSGSNSGNTATLTISRVEAGDEAAYHCQVWDRSSDPYVFGTGTKVTVLGA

SEQ ID NO: 53 - protein, 119 aa, Artificial Sequence
  source: /note="Description of Artificial Sequence: Synthetic polypeptide"
QVQLVQSGAEVKKPGASVKVSCQASGYTFSGHYMHLVRQAPGQGLEWMGWIHPTSGGTTYAQKFQGRVVMTRDTSISTAYMELSRLTSDDTAVYYCARMSQNYDAFDIWGQGTMVTVSS

SEQ ID NO: 54 - protein, 111 aa, Artificial Sequence
  source: /note="Description of Artificial Sequence: Synthetic polypeptide"
QAVLTQPSSVSGAPGQRVTISCTGSSSNIGAGYDVNWYQQFPGTAPKIIVYGDRPSGAPDRFSGSKSGTSASLAITGLRAEDEADYYCQSWDSRLSSYVFGTGTKVTVLGA

SEQ ID NO: 55 - protein, 123 aa, Artificial Sequence
  source: /note="Description of Artificial Sequence: Synthetic polypeptide"
QVQLQESGGGVVQPGGSLRLSCAASGFTFSGYGMHWVRQAPGKGLEWVASVRNDGSNTYYTDSVKDRFTISRDNTKNTLYLQMNSLRAEDTAVYYCAKSRRVMYGTSYYFDYWGRGTLVTVSS

SEQ ID NO: 56 - protein, 110 aa, Artificial Sequence; identical to SEQ ID NO: 30
  source: /note="Description of Artificial Sequence: Synthetic polypeptide"

SEQ ID NO: 57 - protein, 126 aa, Artificial Sequence
  source: /note="Description of Artificial Sequence: Synthetic polypeptide"
EVQLLESGGGLVQPGGSLRLSCAASGFTFSSYAMSWVRQAPGKGLEWVSAISGSGGSTYYADSVKGRFTISRDNSKNTLYLQMNSLRAEDTAVYYCARDLGIDPLWSGYYTPLDYWGRGTMVTVSS

SEQ ID NO: 58 - protein, 112 aa, Artificial Sequence
  source: /note="Description of Artificial Sequence: Synthetic polypeptide"
HVILTQPPSASGTPGQRVTISCSGSSSNIGSNSVSWYQQLPGTAPKLLMYTNNQRPSGVPDRFSGSKSGTSASLAISGLQSEDEADYYCATWDASLNTWVFGGGTKVTVLGA

SEQ ID NO: 59 - protein, 116 aa, Artificial Sequence
  source: /note="Description of Artificial Sequence: Synthetic polypeptide"
EVQLLESGGGLVQPGGSLRLSCAASGFTFSSYAMSWVRQAPGKGLEWVSAISGSGGSTYYADSVKGRFTISRDNSKNTLYLQMNSLRAEDTAVYYCARGGSGSDYWGQGTMVTVSS

SEQ ID NO: 60 - protein, 110 aa, Artificial Sequence
  source: /note="Description of Artificial Sequence: Synthetic polypeptide"
NFMLTQPHSVSGSPGKTVTISCTRSSGYIDSKYVQWYQQRPGSAPTTVIYEDNRRPSGVPDRFSGSIDSNSASLTISGLETEDEADYYCQSYDDTNVVFGGGTKVTVLGA

SEQ ID NO: 61 - protein, 120 aa, Artificial Sequence
  source: /note="Description of Artificial Sequence: Synthetic polypeptide"
EVQLVQSGAEVKEPGASVKVSCKASGYDFSNYGFSWVRQAPGQGLEWMGWISSYNGYTNYAQRLQGRVTMTTDTSTSTAYMELRSLRSDDTAVYYCARDRGLGNWYFDLWGQGTLVTVSS

SEQ ID NO: 62 - protein, 112 aa, Artificial Sequence; identical to SEQ ID NO: 32
  source: /note="Description of Artificial Sequence: Synthetic polypeptide"

SEQ ID NO: 63 - protein, 108 aa, Artificial Sequence
  source: /note="Description of Artificial Sequence: Synthetic polypeptide"
QSVLTQPPSVSVAPGQTARMTCGGNNIESKTVHWYQQKPGQAPVLVVYNDNVRPSGIPARFSGSNSGNTATLTINRVEAGDEADYYCQVWDSSRDQGVFGGGTKLTVL

SEQ ID NO: 64 - protein, 110 aa, Artificial Sequence
  source: /note="Description of Artificial Sequence: Synthetic polypeptide"
QAVLTQPSSVSAAPGQEVSISCSGARSNVGGNYVSWYQHLPGTAPKLLIYDNNKRPSGMPDRFSGSKSGTSATLGITGVQTEDEADYYCATWDSSLSAVVFGGGTKLTVL

SEQ ID NO: 65 - protein, 118 aa, Artificial Sequence
  source: /note="Description of Artificial Sequence: Synthetic polypeptide"
QVQLVQSGSEVRRPGSSVRISCTASGDTSSSFTVNWVRQAPGQGLEWMGGITPMFGTANYAQVFEDRVTIIADEMELSGLTSEDTAVYFCATGPSDYVWGSYRFLDNWGRGTLVTVSS

SEQ ID NO: 66 - protein, 110 aa, Artificial Sequence
  source: /note="Description of Artificial Sequence: Synthetic polypeptide"
QSVLTQPPSVSAAPGQKVTISCSGGRSSIGNNYVSWYQHLPGTAPKLLIYDNNQRPSGIPDRFSGSKSGTSATLGITGLQTGDEADYYCGTWDSSLSAVVFGGGTKVTVL

SEQ ID NO: 67 - protein, 119 aa, Artificial Sequence
  source: /note="Description of Artificial Sequence: Synthetic polypeptide"
EVQLVETGGGLVQPGGSLRLSCAASGFTFSSYGMNWVRQAPGKGLEWVSYISSSGNTIFYADSVKGRFTISRDSAKNSVSLQMNSLRDEDTAVYYCASYYSYYYGMDAWGQGTMVTVSS

SEQ ID NO: 68 - protein, 110 aa, Artificial Sequence
  source: /note="Description of Artificial Sequence: Synthetic polypeptide"
SYVLTQPPSASGTPGQRVTISCSGSSSNIGSNTVNWYQQLPGTAPKLLIYSNNQRPSGVPDRFSGSKSGTSASLAISGLRSEDEADYYCAAWDYSLSGWVFGGGTKVTVL

SEQ ID NO: 69 - protein, 110 aa, Artificial Sequence
  source: /note="Description of Artificial Sequence: Synthetic polypeptide"
QSVLTQPPSASGTPGQRVTISCSGSSSNIGSNYVYWYQQLPGTAPKLLIYRNNQRPSGVPDRFSGSKSGTSASLAISGLRSEDEADYYCAAWDDSLSGWVFGGGTKLTVL

SEQ ID NO: 70 - protein, 110 aa, Artificial Sequence
  source: /note="Description of Artificial Sequence: Synthetic polypeptide"
QSVLTQPPSVSAAPGQKVTISCSGSTSNIGNNYVSWYQQHPGKAPKLMIYDVSKRPSGVPDRFSGSKSGNSASLDISGLQSEDEADYYCAAWDDSLSEFLFGTRTKLTVL

SEQ ID NO: 71 - protein, 110 aa, Artificial Sequence
  source: /note="Description of Artificial Sequence: Synthetic polypeptide"
QSVLTQPPSASGSPGQSVTISCTGTSSDVGAYDFVSWYQQHPGKAPKLMIYEVNKRPSGVPDRFSGSKSGNTASLTVSGLQAEDEADYYCSSYAGSKNLLFGGGTKLTVL

SEQ ID NO: 72 - protein, 111 aa, Artificial Sequence
  source: /note="Description of Artificial Sequence: Synthetic polypeptide"
QAVLTQPSAVSGAPGQRVTISCTGTSSNIGTNYLVHWYQQRPGTAPQLLVSGNNTRPSGVTDRFSVSKSATSASLAITGLQAEDEADYYCQTYDINLRVWVFGGGTKVTVL

SEQ ID NO: 73 - protein, 107 aa, Artificial Sequence
  source: /note="Description of Artificial Sequence: Synthetic polypeptide"
DIQMTQSPSTLSASIGDRVTITCRASEGIYHWLAWYQQKPGKAPKLLIYKASSLASGAPSRFSGSGSGTDFTLTISSLQPDDFATYYCQQYSNYPLTFGGGTKLEIK

SEQ ID NO: 74 - protein, 110 aa, Artificial Sequence
  source: /note="Description of Artificial Sequence: Synthetic polypeptide"
SSELTQPASVSGSPGQSITISCTGTSSDVGGYNYVSWYLQHPGKAPKLMIYEGSKRPSGVSNRFSGSKSGNTASLTISGLQAEDEADYYCSSYTTRSTRVFGGGTKLTVL

SEQ ID NO: 75 - protein, 110 aa, Artificial Sequence
  source: /note="Description of Artificial Sequence: Synthetic polypeptide"
QSVLTQPPSASGTPGQRVTISCSGSSSNIGTNTVNWYQQLPGTAPKLLIYTSNQRPSGVPARFSASNSGTSASLAISGLRSEDEADYYCAAWDDKLSGAVFGGGTKLTVL

SEQ ID NO: 76 - protein, 110 aa, Artificial Sequence
  source: /note="Description of Artificial Sequence: Synthetic polypeptide"
QSVLTQPPSASGTPGQTVTISCSGSSSNIGSSVVNWYQQFPGTAPKVLVYSNTQRPSGVPDRFSGSRSGTSASLAISGLQSEDEADYYCLAWDASLNGWVFGGGTKLTVL

SEQ ID NO: 77 - protein, 110 aa, Artificial Sequence
  source: /note="Description of Artificial Sequence: Synthetic polypeptide"
HVILTQPPSTSGTPGQTVTISCSGSSSNIGSHYVYWYQQLPGTAPKLLIYRNNQRPSGVPDRFSGSKSGTSASLAISGLRSEDETDYYCAAWDDSLSGRVFGTGTKLTVL

SEQ ID NO: 78 - protein, 109 aa, Artificial Sequence
  source: /note="Description of Artificial Sequence: Synthetic polypeptide"
NFMLTQPHSVSESPGKTVTISCTGSSGSIASNYVQWYQQRPDSAPTTVIYEDNRRSSGVPDRFSGSIDSNSASLSISGLKTEDEADYYCQSYDSSGHVVFGGGTKLTVL

SEQ ID NO: 79 - protein, 108 aa, Artificial Sequence
  source: /note="Description of Artificial Sequence: Synthetic polypeptide"
SSELTQDPAVSVALGQTVRITCQGDSLRSYYASWYQQKPGQAPVLVIYGKNNRPSGIPDRFSGSSSGNTASLTITGAQAEDEADYYCNSRDSSGNHVVFGGGTKLTVL

SEQ ID NO: 80 - protein, 110 aa, Artificial Sequence
  source: /note="Description of Artificial Sequence: Synthetic polypeptide"
QSVLTQPASVSGSPGQSITISCTGTSSDVGGYNYVSWYQQHPGKAPKLMIYEGSKRPSGVSNRFSGSKSGNTASLTISGLQAEDEADYYCSSYTTRSTRVFGGGTKLTVL

SEQ ID NO: 81 - protein, 110 aa, Artificial Sequence; identical to SEQ ID NO: 80
  source: /note="Description of Artificial Sequence: Synthetic polypeptide"

SEQ ID NO: 82 - protein, 111 aa, Artificial Sequence
  source: /note="Description of Artificial Sequence: Synthetic polypeptide"
QSVLTQPPSVSGAPGQRVTISCTGRSSNIGAGHDVHWYQQLPGTAPKLLIYGDSNRPSGVPDRFSGSRSGTSASLAITGLQAEDEADYYCQSYDSSLRGSVFGGGTKVTVL

SEQ ID NO: 83 - protein, 110 aa, Artificial Sequence
  source: /note="Description of Artificial Sequence: Synthetic polypeptide"
QTVVIQEPSFSVSPGGTVTLTCGLSSGSVSTSYYPSWYRQTPGQAPHTLIHNTKIRSSGVPDRFSGSILGNNAALTITGAQADDESDYYCLLYMGSGIYVFGGGTKLTVL

SEQ ID NO: 84 - protein, 108 aa, Artificial Sequence; identical to SEQ ID NO: 79
  source: /note="Description of Artificial Sequence: Synthetic polypeptide"

SEQ ID NO: 85 - protein, 109 aa, Artificial Sequence
  source: /note="Description of Artificial Sequence: Synthetic polypeptide"
QTVVLQEPSFSVSPGGTVTLTCGLNFGSVSTAYYPSWYQQTPGQAPRTLIYGTNIRSSGVPDRFSGSIVGNKAALTITGAQTEDESDYYCALYMGSGMLFGGGTKVTVL

SEQ ID NO: 86 - protein, 110 aa, Artificial Sequence
  source: /note="Description of Artificial Sequence: Synthetic polypeptide"
QSVLTQPPSASGTPGQRVTISCSGSSSNIGSNTVNWYQRLPGAAPQLLIYNNDQRPSGIPDRFSGSKSGTSGSLVISGLQSEDEADYYCASWDDSLNGRVFGGGTKLTVL

SEQ ID NO: 87 - protein, 107 aa, Artificial Sequence; identical to SEQ ID NO: 73
  source: /note="Description of Artificial Sequence: Synthetic polypeptide"

SEQ ID NO: 88 - protein, 108 aa, Artificial Sequence
  source: /note="Description of Artificial Sequence: Synthetic polypeptide"
SSELTQDPAVSVALGQTVRITCQGDSLRSYYASWYQQKPGQAPVLVIYGKNNRPSGIPDRFSGSSSGNTASLTITGAQAEDEADYYCHSRDSSGNHVLFGGGTKLTVL

SEQ ID NO: 89 - protein, 110 aa, Artificial Sequence
  source: /note="Description of Artificial Sequence: Synthetic polypeptide"
QAVVLQEPSFSVSPGGTVTLTCGLRSGSVSTSHYPSWYQQTPGQAPRTLIYSTNTRSSGVPDRFSGSILGNKAALTITGAQADDESNYYCMLYMGSGMYVFGGGTKVTVL

SEQ ID NO: 90 - protein, 108 aa, Artificial Sequence
  source: /note="Description of Artificial Sequence: Synthetic polypeptide"
QSVLTQPPSVSVAPGQTARITCGGDKIGHKSVHWYQQKPGQAPVLLVYDDRKRPSGIPERFSGSNSGNTATLTISRVEAGDEAAYHCQVWDRSSDPYVFGTGTKVTVL

SEQ ID NO: 91 - protein, 109 aa, Artificial Sequence
  source: /note="Description of Artificial Sequence: Synthetic polypeptide"
QAVLTQPSSVSGAPGQRVTISCTGSSSNIGAGYDVNWYQQFPGTAPKIIVYGDRPSGAPDRFSGSKSGTSASLAITGLRAEDEADYYCQSWDSRLSSYVFGTGTKVTVL

SEQ ID NO: 92 - protein, 108 aa, Artificial Sequence; identical to SEQ ID NO: 79
  source: /note="Description of Artificial Sequence: Synthetic polypeptide"

SEQ ID NO: 93 - protein, 110 aa, Artificial Sequence
  source: /note="Description of Artificial Sequence: Synthetic polypeptide"
HVILTQPPSASGTPGQRVTISCSGSSSNIGSNSVSWYQQLPGTAPKLLMYTNNQRPSGVPDRFSGSKSGTSASLAISGLQSEDEADYYCATWDASLNTWVFGGGTKVTVL

SEQ ID NO: 94 - protein, 108 aa, Artificial Sequence
  source: /note="Description of Artificial Sequence: Synthetic polypeptide"
NFMLTQPHSVSGSPGKTVTISCTRSSGYIDSKYVQWYQQRPGSAPTTVIYEDNRRPSGVPDRFSGSIDSNSASLTISGLETEDEADYYCQSYDDTNVVFGGGTKVTVL

SEQ ID NO: 95 - protein, 110 aa, Artificial Sequence; identical to SEQ ID NO: 80
  source: /note="Description of Artificial Sequence: Synthetic polypeptide"

SEQ ID NO: 96 - DNA, 360 bp, Artificial Sequence
  source: /note="Description of Artificial Sequence: Synthetic polynucleotide"
gaggtccagctggtgcagtctggggctgaggtgaagaagcctggggcctcagtgaaggtctcctgcaaggcttctggatacaccttcaccggctactatatgcactgggtgcgacaggcccctggacaagggcttgagtggatgggatggatcaaccctaacagtggtggcacaaactatgcacagaagtttcagggctgggtcaccatgaccagggacacgtccatcagcacagcctacatggagctgagcaggctgagatctgacgacacggccgtgtattactgtgcgagagattctactatggccccaggtgcttttgatatctggggccgaggcaccctggtcaccgtctcgagt

SEQ ID NO: 97 - DNA, 321 bp, Artificial Sequence
  source: /note="Description of Artificial Sequence: Synthetic polynucleotide"
cagtctgtgctgactcagccaccctcggtgtcagtggccccaggacagacggccaggatgacctgtgggggaaacaacattgaaagtaaaactgtgcattggtaccagcagaagccgggccaggcccctgtgctggtcgtctacaatgataacgtccggccctcagggatccctgcgcgattctctggctccaactccggcaacacggccaccctgaccatcaacagggtcgaagccggggatgaggccgactattattgtcaggtgtgggactccagtagagatcaaggggtattcggcggagggaccaagctgaccgtc

SEQ ID NO: 98 - DNA, 320 bp, Artificial Sequence
  source: /note="Description of Artificial Sequence: Synthetic polynucleotide"
ggaggcctgggtcctcggtgagggtctcctgcacggcttctggagacacctccagcagctttaccgtcaactggctgcgacaggcccctggacaaggtcttgagtggatgggagggatcacccctatgtttggcactgcaaactacgcacagatgttcgaggacagagtcacgataaccgcggacgaaatggaactgagtggcctgacatctgaggacacggccgtgtatttttgtgcgacaggcccctccgattacgtttgggggagttatcgtttccttgacacctgggggcgggggaccacggtcaccgtctcgagt

SEQ ID NO: 99 - DNA, 330 bp, Artificial Sequence
  source: /note="Description of Artificial Sequence: Synthetic polynucleotide"
caggctgtgctgactcagccgtcctcagtgtctgcggccccaggacaggaggtctccatctcctgctctggagccagatccaacgttgggggtaattatgtttcctggtaccaacacctcccaggaacagcccccaaactcctcatttatgacaataataagcgaccctcagggatgcctgaccgattctctggctccaagtctggcacgtcagccaccctgggcatcaccggagtccagactgaggacgaggccgattattactgcgcaacatgggatagcagcctgagcgctgtggtcttcggcggagggaccaagctgaccgtccta

SEQ ID NO: 100 - DNA, 354 bp, Artificial Sequence
  source: /note="Description of Artificial Sequence: Synthetic polynucleotide"
caggtgcagctggtgcagtctgggtctgaggtgaggaggcctgggtcctcggtgaggatctcctgcacggcttctggagacacctccagcagctttaccgtcaactgggtgcgacaggcccctggacaaggtcttgagtggatgggagggatcacccctatgtttggcactgcaaactacgcacaggtgttcgaggacagagtcacaataatcgcggacgagatggaactgagtggcctgacatctgaggacacggccgtgtatttctgtgcgacaggcccctccgattacgtttgggggagttatcgtttccttgacaactggggcaggggcaccctggtcaccgtctcgagt

SEQ ID NO: 101 - DNA, 330 bp, Artificial Sequence
  source: /note="Description of Artificial Sequence: Synthetic polynucleotide"
cagtctgtgctgactcagccaccctcagtgtctgcggccccagggcagaaggtcaccatctcctgctctggaggcaggtccagcattgggaataattatgtgtcctggtatcaacacctcccaggaacagcccccaaactcctcatctatgacaataatcagcgaccctcagggattcctgaccgattctctggctccaagtctggcacgtcagccaccctgggcatcaccggactccagactggggacgaggccgattattactgcggaacatgggatagcagcctgagtgctgtggtgtttggcggagggaccaaggtcaccgtccta

SEQ ID NO: 102 - DNA, 363 bp, Artificial Sequence
  source: /note="Description of Artificial Sequence: Synthetic polynucleotide"
gaggtgcagctggtggagactgggggaggcttggtacagcctggggggtccctgagactctcctgtgcagcctctggattcaccttcagtagctatggcatgaactgggtccgccaggctccagggaaggggctggagtgggtttcatacattagtagttctggtaataccatattctacgcagactctgtgaagggccgattcaccatctccagagacagtgccaagaattcagtgtctctgcagatgaacagcctgagagacgaggacacggctgtgtattactgtgcttcctactactcctactactacggtatggacgcctggggccaggggacaatggtcaccgtctcgagttcgagt

SEQ ID NO: 103 - DNA, 300 bp, Artificial Sequence
  source: /note="Description of Artificial Sequence: Synthetic polynucleotide"
tctgggacccccgggcagagggtcaccatctcttgttctggaagcagctccaacatcggaagtaatactgtaaactggtaccagcagctcccaggaacggcccccaaactcctcatctatagtaataatcagcggccctcaggggtccctgaccgattctctggctccaagtctggcacctcagcctccctggccatcagtgggctgcggtccgaggatgaggctgattattactgtgcagcatgggattacagcctgagtggttgggtgttcggcggagggaccaaggtcaccgtccta

SEQ ID NO: 104 - DNA, 366 bp, Artificial Sequence
  source: /note="Description of Artificial Sequence: Synthetic polynucleotide"
gaagtgcagctggtgcagtctggggctgaggtgaagaagcctggggcctcagtgaaggtctcctgcaaggcttctgggtacagcttcaccgccttctatattcactgggtgcgacaggcccctggacaaggccttgagtatttgggatggatcgaccctaatactggtgccacaaaatatgcacagcgctttcagggcagggtcatcatgacctgggacacgtccatcaccacagccaccatggaactgagcaggctgacgtctgacgactcggccgtctactactgtgtgagagatttgcgggagtggggctacgaattgtccgttgagtattggggcagaggaaccctggtcaccgtctcgagt

SEQ ID NO: 105 - DNA, 330 bp, Artificial Sequence
  source: /note="Description of Artificial Sequence: Synthetic polynucleotide"
cagtctgtgctgactcagccaccctcagcgtctgggacccccgggcagagggtcaccatctcttgttctggaagcagctccaacatcggaagtaattatgtatactggtaccagcagctcccaggaacggcccccaaactcctcatctataggaataatcagcggccctcaggggtccctgaccgattctctggctccaagtctggcacctcagcctccctggccatcagtgggctccggtccgaggatgaggctgattattactgtgcagcatgggatgacagcctgagtggttgggtgttcggcggagggaccaagctgaccgtccta

SEQ ID NO: 106 - DNA, 345 bp, Artificial Sequence
  source: /note="Description of Artificial Sequence: Synthetic polynucleotide"
gaggtgcagctggtggagactgggggaggcgtggtccagcctggggggtccctgagcctctcctgtgcagcgtctggattcaccttcagtagctatggcatgcagtgggtccgccaggctccaggcaaggggctggagtgggtggcgtttatacggtacgatggaagtagtgaatactatgcagactccgtgaagggccgattcaccatctccagagacaattccaagaacacgctgtatctgcaaatgaacagcctgagagctgaggacacggctgtgtattactgtggaagaacgctggagtctagtttgtggggcaagggaaccctggtcaccgtctcgagt

SEQ ID NO: 107 - DNA, 330 bp, Artificial Sequence
  source: /note="Description of Artificial Sequence: Synthetic polynucleotide"
cagtctgtgttgacgcagccgccctcagtgtctgcggccccaggacagaaggtcaccatttcctgctctggaagcacctccaacattgggaataattatgtctcctggtaccaacagcacccaggcaaagcccccaaactcatgatttatgatgtcagtaagcggccctcaggggtccctgaccgattctctggctccaagtctggcaactcagcctccctggacatcagtgggctccagtctgaggatgaggctgattattactgtgcagcatgggatgacagcctgagtgaatttctcttcggaactaggaccaagctgaccgtccta

SEQ ID NO: 108 - DNA, 354 bp, Artificial Sequence
  source: /note="Description of Artificial Sequence: Synthetic polynucleotide"
caggtgcagctgcaggagtcgggtccaggactggtgaagccctcgcagaccttgtcactcacctgtggcatctccggggacagtgtctctagcaacagtgctgcttggaactggatcaggcagtccccaacgagaggccttgagtggctgggaaggacatattacaggtccagttggtatcataactatgcaccttctatgaacagtcgattaaccatcatcgcagacacatccaaaaaccagttctctttgcaactgaactctgtgactcccgaggacacggctgtatattactgtgcaagcgggtgggcctttgatgtctggggcaggggaaccctggtcaccgtctcgagt

SEQ ID NO: 109 - DNA, 330 bp, Artificial Sequence
  source: /note="Description of Artificial Sequence: Synthetic polynucleotide"
cagtctgtgctgactcagccaccctccgcgtccgggtctcctggacagtcagtcaccatctcctgcactggaaccagcagtgacgttggtgcttatgactttgtctcctggtaccaacagcaccctggcaaagcccccaaactcatgatttatgaggtcaataagcggccctcaggggtccctgatcgcttctctggctccaagtctggcaacacggcctccctgaccgtctctgggctccaggctgaggatgaggctgattattactgcagctcatatgcaggcagcaagaatttgcttttcggcggagggaccaagctgaccgtccta

SEQ ID NO: 110 - DNA, 357 bp, Artificial Sequence
  source: /note="Description of Artificial Sequence: Synthetic polynucleotide"
gaggtgcagctgttggagtctgggggaggcttggtacagcctggggggtccctgagactctcctgtgcagcctctggattcacctttagcagctatgccatgagctgggtccgccaggctccagggaaggggctggagtgggtctcagctattagtggtagtggtggtagcacatactacgcagactccgtgaagggccggttcaccatctccagagacaattccaagaacacgctgtatctgcaaatgaacagcctgagagccgaggacacggccgtgtattactgtgcgagacagtcgggcgcggactggtacttcgatctctggggccgaggcaccctggtcaccgtctcgagt

SEQ ID NO: 111 - DNA, 333 bp, Artificial Sequence
  source: /note="Description of Artificial Sequence: Synthetic polynucleotide"
caggctgtgctgactcagccgtccgcagtttctggggccccagggcagagggtcaccatctcctgcactgggaccagctccaacatcgggacaaactatcttgtacactggtatcagcaacgtccaggaacagccccccaactcctcgtctctggtaacaacactcgaccctctggggtcactgaccggttctctgtctccaagtctgccacttcagcctccctggccatcactgggctccaggctgaggatgaggctgattattactgccagacctatgacatcaacttgagggtttgggtgttcggcggagggaccaaggtcaccgtccta

SEQ ID NO: 112 - DNA, 375 bp, Artificial Sequence
  source: /note="Description of Artificial Sequence: Synthetic polynucleotide"
caggtgcagctggtgcagtctggagctgaggtgaagaagcctgggtcctcggtgaaggtctcctgcaaggcttctggttacacctttaccagctatggtatcagctgggtgcgacaggcccctggacaagggcttgagtggatgggatggatcagcgcttacaatggtaacacaaactatgcacagaagctccagggcagagtcaccatgaccacagacacatccacgagcacagcctacatggagctgaggagcctgagatctgacgacacggccgtgtattactgtgcgagagtcccgggcgtaagtgggagctatccagactactactacatggacgtctggggcaagggaaccctggtcaccgtctcctca

SEQ ID NO: 113 - DNA, 321 bp, Artificial Sequence
  source: /note="Description of Artificial Sequence: Synthetic polynucleotide"
gacatccagatgacccagtctccttccaccctgtctgcatctattggagacagagtcaccatcacctgccgggccagtgagggtatttatcactggttggcctggtatcagcagaagccagggaaagctcctaaactcctgatctataaggcctctagtttagccagtggggccccatcaaggttcagcggcagtggatctgggacagatttcactctcaccatcagcagcctgcagcctgatgattttgcaacttattactgccaacaatatagtaattatccgctcactttcggcggagggaccaagctggagatcaaa

SEQ ID NO: 114 - DNA, 359 bp, Artificial Sequence
  source: /note="Description of Artificial Sequence: Synthetic polynucleotide"
gaggtgcagctggtgcagtctgggggaggcttggtcaggcctggagggtccctgagactctcctgtgcagcctcgggattctccttcagtgactactacatgacctggatccgccagattccagggaaggggctggagtgggtggcagttatatggaatgatggaagtgatagatactatgcagactccgtgaagggccgattcaccatttccagagacaattccaagaacacgctgtttctgcaaatgagcagcctgagagacgaggacacggctctatattactgtgtgagagggggaccaacagcttcaagcggatttgactactggggccgaggcaccctggtcaccgtctcgag

SEQ ID NO: 115 - DNA, 330 bp, Artificial Sequence
  source: /note="Description of Artificial Sequence: Synthetic polynucleotide"
tcgtctgagctgactcagcctgcctccgtgtctgggtctcctggacagtcgatcaccatctcctgcactggaaccagcagtgacgttggtggttataactatgtctcctggtacctacaacacccaggcaaagcccccaaactcatgatttatgagggcagtaagcggccctcaggggtttctaatcgcttctctggctccaagtctggcaacacggcctccctgacaatctctgggctccaggctgaggacgaggctgattattactgcagctcatatacaaccaggagcactcgagttttcggcggagggaccaagctgaccgtccta

SEQ ID NO: 116 - DNA, 357 bp, Artificial Sequence
  source: /note="Description of Artificial Sequence: Synthetic polynucleotide"
gaggtgcagctggtgcagtctggggcagaggtgaaaaagcccggggagtctctgaagatctcctgtaagggttttggatacaattttcgcagcgcctggatcggctgggtgcgccagatgcccggcaaaggcctggagtggatgggggtcatctatcctggtgactctgatgtcagatacagtccgtccttccaaggccaggtcaccatctcagccgacaagtccatcagtaccgcctacctgcagtggagcagcctgaaagcctcggacaccgccatgtattattgtacgagacccgtagggcagtgggtggactctgactattggggcaagggaaccctggtcaccgtctcgagt

SEQ ID NO: 117 - DNA, 330 bp, Artificial Sequence
  source: /note="Description of Artificial Sequence: Synthetic polynucleotide"
cagtctgtgttgacgcagccgccctcagcgtctgggacccccggacagagggtcaccatctcttgttctggaagcagctccaacatcggaactaatactgtgaactggtaccagcagcttccaggaacggcccccaaactcctcatctatactagtaatcagcggccctcaggggtccctgcccgcttctctgcctccaactctggcacctcagcctccctggccatcagtgggctccggtccgaggatgaggctgattattattgtgcagcgtgggatgacaagttgagtggtgcggtgttcggcggagggaccaagctgaccgtccta

SEQ ID NO: 118 - DNA, 360 bp, Artificial Sequence
  source: /note="Description of Artificial Sequence: Synthetic polynucleotide"
gaggtgcagctgttggagtctgggggaggcttggtacagcctggggggtccctgagactctcctgtgcagcctctggattcacctttagcagctatgccatgagctgggtccgccaggctccagggaaggggctggagtgggtctcagctattagtggtagtggtggtagcacatactacgcagactccgtgaagggccggttcaccatctccagagacaattccaagaacacgctgtatctgcaaatgaacagcctgagagccgaggacacggccgtgtattactgtgcgagatggaggcctcttctagactaccactttgaccaatggggccaagggacaatggtcaccgtctcgagt

SEQ ID NO: 119 - DNA, 330 bp, Artificial Sequence
  source: /note="Description of Artificial Sequence: Synthetic polynucleotide"
cagtctgtgctgactcagccaccctcagcgtctgggacccccggacagacggtaacaatctcttgttctggaagcagctccaacatcggaagtagtgttgttaattggtaccagcagttcccaggaacggcccccaaagtcctcgtctatagtaacactcagcggccctcaggggtccctgaccgattctctggctccaggtctggcacctcagcctccctggccatcagtgggctccagtctgaggatgaggctgattattactgtttagcatgggatgccagcctgaatggttgggtgttcggcggagggaccaagctgaccgtccta

SEQ ID NO: 120 - DNA, 357 bp, Artificial Sequence
  source: /note="Description of Artificial Sequence: Synthetic polynucleotide"
gaggtgcagctgttggagtctgggggaggcttggtacagcctggggggtccctgagactctcctgtgcagcctctggattcacctttagcagctatgccatgagctgggtccgccaggctccagggaaggggctggagtgggtctcagctattagtggtagtggtggtagcacatactacgcagactccgtgaagggccggttcaccatctccagagacaattccaagaacacgctgtatctgcaaatgaacagcctgagagccgaggacacggccgtgtattactgtgcgagaggatacagtggctacgatgaccctgactcctgggggagagggaccacggtcaccgtctcgagt

SEQ ID NO: 121 - DNA, 330 bp, Artificial Sequence
  source: /note="Description of Artificial Sequence: Synthetic polynucleotide"
cacgttatactgactcaaccgccctcaacgtctgggacccccgggcagacggtcaccatctcttgttctgggagcagctccaacatcggaagtcattatgtatactggtaccagcagctcccaggaacggcccccaaactcctcatctataggaataatcagcggccctcaggggtccctgaccgattctctggctccaagtctggcacctcagcctccctggccatcagtgggctccggtccgaggatgagactgattattactgtgcagcatgggatgacagcctgagtggtcgagtcttcggaactgggaccaagctgaccgtccta

SEQ ID NO: 122 - DNA, 342 bp, Artificial Sequence
  source: /note="Description of Artificial Sequence: Synthetic polynucleotide"
caggtacagctgcagcagtcaggggctgaggtgaagaagcctgggtcctcggtgaaggtctcctgcaaggcttctggaggcaccatcagcaactatgctatcagttgggtgcggctggcccctggacaaggtcttgagtggatgggaagtatcgtccctcttcatgggacaacaaacttcgcacagaaattccagggcagagtcacgatcaccgcggacgagtccacgagcacatcctacatggaggtgaacgtcctgacatatgaagacacggcgatgtattattgtgcgtctctcaattggggctactggggccggggcaccctggtcaccgtctcgagt

SEQ ID NO: 123 - DNA, 333 bp, Artificial Sequence
  source: /note="Description of Artificial Sequence: Synthetic polynucleotide"
aattttatgctgactcagccccactctgtgtcggagtctccggggaagacggtaaccatctcctgcaccggcagtagtggcagcattgccagcaactatgtgcagtggtaccagcagcgcccggacagtgcccccaccactgtgatctatgaggataatcgaagatcctctggagtccctgatcggttctctggctccatcgacagctcctccaactctgcctccctcagcatctctggactgaagactgaggacgaggctgactactactgtcagtcctatgatagtagcggtcatgtggtcttcggcggagggaccaagctgaccgtccta

SEQ ID NO: 124 - DNA, 360 bp, Artificial Sequence
  source: /note="Description of Artificial Sequence: Synthetic polynucleotide"
gaggtgcagctggtggagtctggggaaggcctggtcaagcctggggggtccctgagactctcctgtacagcctctggattcaccttcaggagttatagcttgaactgggtccgccaggctccagggcaggggctggagtgggtctcatccattagtagtactagtacttacatatactacgcagactcggtgaagggccgattcaccatctccagagacgacgccaagaacacactgtatctgcaaatgaacagcctgagagccgaagacacagctgcatattactgtgttagactgggatctggtgggggatattttcctgactactggggcaggggcaccctggtcaccgtctcgagt

SEQ ID NO: 125 - DNA, 324 bp, Artificial Sequence
  source: /note="Description of Artificial Sequence: Synthetic polynucleotide"
tcgtctgagctgactcaggaccctgctgtgtctgtggccttgggacagacagtcaggatcacatgccaaggagacagcctcagaagctattatgcaagctggtaccagcagaagccaggacaggcccctgtacttgtcatctatggtaaaaacaaccggccctcagggatcccagaccgattctctggctccagctcaggaaacacagcttccttgaccatcactggggctcaggcggaagatgaggctgactattactgtaactcccgggacagcagtggtaaccatgtggtattcggcggagggaccaagctgaccgtccta

SEQ ID NO: 126 - DNA, 342 bp, Artificial Sequence
  source: /note="Description of Artificial Sequence: Synthetic polynucleotide"
caggtgcagctggtgcagtctgggggaggcttggtccagccgggggggtccctgagactctcctgtgcagcctctggattcacgtttagtacctatgccatgagttgggcccgccaggctccagggaaggggctggagtgggtctcaagtattagtggtgatggtggaagaattctcgatgcagactccgcgaagggccggttcaccatctccagagacaattccaagaacacgctgtatctgcaaatgaacggcctgagagtcgaggacacggccctttattactgtgcgagagcggacggtaactactggggcagggggacaatggtcaccgtctcttca

SEQ ID NO: 127 - DNA, 330 bp, Artificial Sequence
  source: /note="Description of Artificial Sequence: Synthetic polynucleotide"
cagtctgtgctgactcagcctgcctccgtgtctgggtctcctggacagtcgatcaccatctcctgcactggaaccagcagtgacgttggtggttataactatgtctcctggtaccaacaacacccaggcaaagcccccaaactcatgatttatgagggcagtaagcggccctcaggggtttctaatcgcttctctggctccaagtctggcaacacggcctccctgacaatctctgggctccaggctgaggacgaggctgattattactgcagctcatatacaaccaggagcactcgagttttcggcggagggaccaagctgaccgtccta

SEQ ID NO: 128 - DNA, 363 bp, Artificial Sequence
  source: /note="Description of Artificial Sequence: Synthetic polynucleotide"
caggtgcagctggtggagtctggggctgaggtgaagaagcctggggcctcagtgaaggtctcctgcaaggcttctggatacaccttcaccagttatgatatcaactgggtgcgacaggcccccggacaaaggcttgagtggatgggatggatcaacgctggcaatggtaacacaaaatattcacagaagttccagggcagagtcaccattaccagggacacatccgcgagcacagcctacatggagctgaggagcctgagatctgacgacacggccgtgtattactgtgcgagagggaggagctatggccacccgtactactttgactactggggccagggaaccctggtcaccgtctcgagt

SEQ ID NO: 129 - DNA, 330 bp, Artificial Sequence; identical to SEQ ID NO: 127
  source: /note="Description of Artificial Sequence: Synthetic polynucleotide"

SEQ ID NO: 130 - DNA, 354 bp, Artificial Sequence
  source: /note="Description of Artificial Sequence: Synthetic polynucleotide"
gaggtgcagctggtgcagtctgggggaggcctggtcaagcctggggggtccctgagactctcctgtgcagcgtctggattcaccttcagtagctatgggatgcactgggtccgccaggctccaggcaaggggctggagtgggtggcaggtattttttatgatggaggtaataaatactatgcagactccgtgaagggccgattcaccatctccagagacaattccaagaacacgctgtatctgcaaatgaacagcctgagagctgaggacacggctgtgtattactgtgcgagagataggggctactactacatggacgtctggggcaaagggaccacggtcaccgtctcctca

SEQ ID NO: 131 - DNA, 333 bp, Artificial Sequence
  source: /note="Description of Artificial Sequence: Synthetic polynucleotide"
cagtctgtgttgacgcagccgccctcagtgtctggggccccaggacagagggtcaccatctcctgcactgggagaagctccaacatcggggcgggtcatgatgtacactggtaccagcaacttccaggaacagcccccaaactcctcatctatggtgacagcaatcggccctcaggggtccctgaccgattctctggctccaggtctggcacctcagcctccctggccatcactgggctccaggctgaagatgaggctgattattactgccagtcctatgacagcagcctgaggggttcggtattcggcggagggaccaaggtcaccgtccta

SEQ ID NO: 132 - DNA, 369 bp, Artificial Sequence
  source: /note="Description of Artificial Sequence: Synthetic polynucleotide"
aaggtgcagctggtgcagtctgggacagaggtgaaaaagcccggggagtctctgaagatctcctgtcagggttctggatacaggtttagtagtgactggattgcctgggtgcgccagatgcccgggaaaggcctggagtggatggggattgtctatcctggtgactctgataccagatatagcccgtccttccaaggccaagtcaccatctcagccgacaagtccatcagtactgcctacctgcagtggagcggcctgaaggcctcggacaccgccaagtattactgtgcgagagtgcaacaggcagtgggagctaaaggttatgctatggacgtctggggcaagggaaccctggtcaccgtctcgagt

SEQ ID NO: 133 - DNA, 330 bp, Artificial Sequence
  source: /note="Description of Artificial Sequence: Synthetic polynucleotide"
cagactgtggtgatccaggagccatcgttctcagtgtcccctggagggacagtcacactcacttgtggcttgagctctggctcagtctctaccagttactaccccagctggtaccggcagaccccaggccaggctccacacacactcattcacaacacaaagattcgctcctctggggtccctgatcgcttctctggctccatccttgggaacaatgctgccctcaccatcacgggggcccaggcagatgatgaatctgattattactgtcttttgtatatgggtagcggcatttacgtgttcggcggagggaccaagctgaccgtccta

SEQ ID NO: 134 - DNA, 366 bp, Artificial Sequence
  source: /note="Description of Artificial Sequence: Synthetic polynucleotide"
caggtgcagctgcaggagtcgggcgcaggactggtgaagccttcggggaccctgtccctcacctgcgctgtctctggtggctccatcagcagtggtaactggtggagttgggtccgccagcccccagggaaggggctggagtggattggggaaatctctcatagtgggagcaccaactacaacccgtccctcaagagtcgagtcaccatatcagtagacaagtccaagaaccagttctccctgaacctgagttctgtgaccgccgcagacacggccgtgtattactgtgcgagagtaaggggtacggtgggggatacacggggacctgactactggggccagggaaccctggtcaccgtctcgagt

SEQ ID NO: 135 - DNA, 324 bp, Artificial Sequence; identical to SEQ ID NO: 125
  source: /note="Description of Artificial Sequence: Synthetic polynucleotide"

SEQ ID NO: 136 - DNA, 372 bp, Artificial Sequence
  source: /note="Description of Artificial Sequence: Synthetic polynucleotide"
gaagtgcagctggtgcagtctggggctgaggtgaagaagcctggggcctcagtgagggtctcctgcaagggttctggaaacaccttcaccggccactacatccactgggtgcgacaggcccctggacaaggacttgagtggctgggatggatcgaccctaacactggtgacatacagtattcagaaaactttaagggctcggtcaccttgaccagggacccatccatcaactcagtcttcatggacctgatcaggctgacatctgacgacacggccatgtattactgtgcgagagaaggtgccgggctcgccaactactattactacggtctggacgtctggggccgagggacaatggtcaccgtctcgagt

SEQ ID NO: 137 - DNA, 327 bp, Artificial Sequence
  source: /note="Description of Artificial Sequence: Synthetic polynucleotide"
cagactgtggtgctccaggagccttcgttctcagtgtcccctggggggacagtcacactcacttgtggcttgaactttggctcagtctctactgcttactaccccagttggtaccagcagaccccaggccaagctccacgcacgctcatctacggcacaaatattcgttcctctggggtcccggatcgcttctctggctccatcgtagggaacaaagctgccctcaccatcacgggggcccagacagaagatgagtctgattattattgtgcgctgtatatgggtagtggcatgctcttcggcggcgggaccaaggtcaccgtccta

SEQ ID NO: 138 - DNA, 369 bp, Artificial Sequence
  source: /note="Description of Artificial Sequence: Synthetic polynucleotide"
gaggtgcagctggtgcagtctgggggaggcgtggtccagcctgggaggtccctgagactctcctgtgcagcctctggattcaccttcagtagctatggcatgcactgggtccgccaggctccaggcaaggggctggagtgggtggcagttatatcatatgatggaagtattaaatactatgcagactccgtgaagggccgattcaccatctccagagacaattccaagaacacgctgtatctgcaaatgaacagcctgagagctgaggacacggctgtgtattactgtgcgcgaactggtgaatatagtggctacgatacgagtggttacagcaattggggccaaggcaccctggtcaccgtctcgagt

SEQ ID NO: 139 - DNA, 330 bp, Artificial Sequence
  source: /note="Description of Artificial Sequence: Synthetic polynucleotide"
cagtctgtgctgactcagccaccctcagcgtctgggacccccgggcagagggtcaccatctcttgttctggaagcagctccaacatcgggagtaacactgtaaactggtaccagcgactcccaggagcggccccccaactcctcatctacaataatgaccagcggccctcagggatccctgaccgattctctggctccaagtctggcacctcaggctccctggtcatcagtgggctccagtctgaagatgaggctgattactactgtgcgtcatgggatgacagtctgaatggtcgggtgttcggcggagggaccaagctgaccgtccta

SEQ ID NO: 140 - DNA, 363 bp, Artificial Sequence
  source: /note="Description of Artificial Sequence: Synthetic polynucleotide"
ggggtgcagctggtggagtctgggggaggcctggtcaagcctggggggtccctgagactctcctgtgcagcctctggattcaccttcagtagctataacatgaactgggtccgccaggctccagggaagggactggagtgggtctcagctattagtggtagtggtggtagcacatactacgcagactccgtgacgggccggttcaccatctccagagacaattccaagaacacgctgtatctgcaaatgaacagcctgagagccgaggacacggccgtatattactgtgcgaaagataccagtggctggtacggggacggtatggacgtctggggccggggaaccctggtcaccgtctcgagt

SEQ ID NO: 141 - DNA, 321 bp, Artificial Sequence
  source: /note="Description of Artificial Sequence: Synthetic polynucleotide"
gacatccagatgacccagtctccttccaccctgtctgcatctattggagacagagtcaccatcacctgccgggccagtgagggtatttatcactggttggcctggtatcagcagaagccagggaaagcccctaaactcctgatctataaggcctctagtttagccagtggggccccatcaaggttcagcggcagtggatcagggacagatttcactctcaccatcagcagcctgcagcctgatgattttgcaacttattactgccaacaatatagtaattatccgctcactttcggcggagggaccaagctggagatcaaa

SEQ ID NO: 142 - DNA, 372 bp, Artificial Sequence
  source: /note="Description of Artificial Sequence: Synthetic polynucleotide"
cagatgcagctggtgcagtctgggggaggcgtggtccagcctgggaggtccctgagactctcctgtgcagcctctggattcaccttcagtagctatggcatgcactgggtccgccaggctccaggcaaggggctggagtgggtggcagttatatcatatgatggaagtattaaatactatgcagactccgtgaagggccgattcaccatctccagagacaattccaagaacacactgtatctacaaatgaacagcctgagagccgaggacacgggcgtttattactgttcgaaagatcgctatagcagtggctggtacagctccgatgcttttgatatttggggccgagggacaatggtcaccgtctcgagt

SEQ ID NO: 143 - DNA, 321 bp, Artificial Sequence
  source: /note="Description of Artificial Sequence: Synthetic polynucleotide"
tctgagctgactcaggaccctgctgtgtctgtggccttgggacagacagtcaggatcacatgccaaggagacagcctcagaagctattatgcaagctggtaccagcagaagccaggacaggcccctgtacttgtcatctatggtaaaaacaaccggccctcagggatcccagaccgattctctggctccagctcaggaaacacagcttccttgaccatcactggggctcaggcggaagatgaggctgactattactgtcattcccgggacagcagtggtaaccatgtgcttttcggcggagggaccaagctgaccgtccta

SEQ ID NO: 144 - DNA, 384 bp, Artificial Sequence
  source: /note="Description of Artificial Sequence: Synthetic polynucleotide"
gaggtgcagctggtgcagtctggggcagaggtgaaaaagcccggagagtctctgaagatctcctgtaagggctctggatacacctttaccaaccactggatcgcctgggtgcgccagatgcccgggaaaggcctggagtggatgggcatcatctatcctggtgactctgaaacgaggtacagcccgtccttccaaggccacgtcaccatctcagccgacaagtccatcagtaccgcctatttgcagtggagcaccctgaaggactcggactccgccatgtacttctgtgtgagacaggcccgtggctgggacgacggacgggctggatattattattccggtatggacgcctggggccagggaaccctggtcaccgtctcgagt

SEQ ID NO: 145 - DNA, 330 bp, Artificial Sequence
  source: /note="Description of Artificial Sequence: Synthetic polynucleotide"
caggctgtggtgctccaggagccatcgttctcagtgtcccctggagggacagtcacactcacctgtggcttgcgctctgggtcagtctctactagtcactaccccagctggtaccagcagaccccaggccaggctccacgcacgctcatttacagcacaaacactcgctcttctggggtccctgatcgcttctctggctccatccttgggaacaaagctgccctcaccatcacgggggcccaggcagatgatgaatctaattattactgtatgctatacatgggcagtggcatgtatgtgttcggcggagggaccaaggtcaccgtccta

SEQ ID NO: 146 - DNA, 360 bp, Artificial Sequence
  source: /note="Description of Artificial Sequence: Synthetic polynucleotide"
gaggtgcagctgttggagtctgggggaggcttggtacagcctggggggtccctgagactctcctgtgcagcctctggattcacctttagcagctatgccatgagctgggtccgccaggctccagggaaggggctggagtgggtctcagctattagtggtagtggtggtagcacatactacgcagactccgtgaagggccggttcaccatctccagagacaattccaagaacacgctgtatctgcaaatgaacagcctgagagccgaggacacggccgtgtattactgtgcgagagtcagcgggagccactttccattctttgactcctggggccaggggacaatggtcaccgtctcgagt

SEQ ID NO: 147 - DNA, 324 bp, Artificial Sequence
  source: /note="Description of Artificial Sequence: Synthetic polynucleotide"
cagtctgtgctgactcagccaccctcggtgtcagtggccccaggacagacggccagaattacctgtgggggagacaagattggacataaaagtgtgcattggtatcagcagaagccaggccaggcccctgtgttgctcgtctatgatgataggaagcggccctcagggatccctgagcgattctctggctccaactctgggaacacggccaccctgaccatcagcagggtcgaggccggggatgaggctgcctatcactgtcaggtgtgggatagaagtagtgacccttatgtcttcggaactgggaccaaggtcaccgtccta

SEQ ID NO: 148 - DNA, 357 bp, Artificial Sequence
  source: /note="Description of Artificial Sequence: Synthetic polynucleotide"
caggtgcagctggtgcaatctggggctgaagtgaagaagcctggggcctcagtgaaggtctcttgtcaggcttctggatacaccttcagcgggcactatatgcacttggtgcgacaggcccctggacaagggcttgagtggatggggtggatccaccctaccagtggtggcacaacctatgcacagaagtttcagggccgggtcgttatgaccagggacacgtccatcagcacagcctacatggaactgagtaggctgacatctgacgacacggccgtgtattactgtgcaagaatgtcccaaaactatgatgcttttgatatctggggccaagggacaatggtcaccgtctcgagt

SEQ ID NO: 149 - DNA, 327 bp, Artificial Sequence
  source: /note="Description of Artificial Sequence: Synthetic polynucleotide"
caggctgtgctgactcagccgtcctcagtgtctggggccccagggcagagggtcaccatctcctgcactgggagcagctccaacatcggggcaggttatgatgtaaactggtaccaacaatttccaggaacagcccccaaaattatcgtctatggcgatcggccctcaggggcccctgaccgattctctggctccaagtctggcacctcagcctccctggcaatcactggactccgggctgaggatgaggctgattattactgccagtcctgggacagtcgcctgagtagttatgtcttcggaactgggaccaaggtcaccgtccta

SEQ ID NO: 150 - DNA, 369 bp, Artificial Sequence
  source: /note="Description of Artificial Sequence: Synthetic polynucleotide"
caggtgcagctgcaggagtcggggggaggcgtggtccagcctggggggtccctgagactctcctgtgcagcgtctggattcaccttcagtggctatggcatgcactgggtccgccaggctccaggcaaggggctggagtgggtggcatctgtacggaacgatggaagtaatacatactacacagactccgtgaaggaccgattcaccatctccagagacaacaccaagaacacgctgtatctgcaaatgaacagcctgagagccgaggacacggccgtatattactgtgccaagtcgagaagagtgatgtatggcacctcctattactttgactactggggcagaggcaccctggtcaccgtctcctca

SEQ ID NO: 151 - DNA, 324 bp, Artificial Sequence; identical to SEQ ID NO: 125
  source: /note="Description of Artificial Sequence: Synthetic polynucleotide"

SEQ ID NO: 152 - DNA, 378 bp, Artificial Sequence
  source: /note="Description of Artificial Sequence: Synthetic polynucleotide"
gaggtgcagctgttggagtctgggggaggcttggtacagcctggggggtccctgagactctcctgtgcagcctctggattcacctttagcagctatgccatgagctgggtccgccaggctccagggaaggggctggagtgggtctcagctattagtggtagtggtggtagcacatactacgcagactccgtgaagggccggttcaccatctccagagacaattccaagaacacgctgtatctgcaaatgaacagcctgagagccgaggacacggccgtgtattactgtgcgagagatctgggaatagaccccctttggagtggttattacacaccccttgactattggggccgagggacaatggtcaccgtctcgagt

SEQ ID NO: 153 - DNA, 330 bp, Artificial Sequence
  source: /note="Description of Artificial Sequence: Synthetic polynucleotide"
cacgttatactgactcaaccgccctcagcgtctgggacccccgggcagagggtcaccatctcttgttctggaagcagctccaacatcggaagtaattccgttagctggtaccagcagctcccaggaacggcccccaaactcctcatgtatactaacaatcagcggccctcaggggtccctgaccgattctctggctccaagtctggcacctcagcctccctggccatcagtgggctccagtctgaggatgaggctgattattactgtgcgacatgggatgccagcctgaatacttgggtgttcggcggagggaccaaggtcaccgtccta

SEQ ID NO: 154 - DNA, 348 bp, Artificial Sequence
  source: /note="Description of Artificial Sequence: Synthetic polynucleotide"
gaggtgcagctgttggagtctgggggaggcttggtacagcctggggggtccctgagactctcctgtgcagcctctggattcacctttagcagctatgccatgagctgggtccgccaggctccagggaaggggctggagtgggtctcagctattagtggtagtggtggtagcacatactacgcagactccgtgaagggccggttcaccatctccagagacaattccaagaacacgctgtatctgcaaatgaacagcctgagagccgaggacacggccgtgtattactgtgcgagaggcgggagtgggagtgactactggggccaggggacaatggtcaccgtctcgagt

SEQ ID NO: 155 - DNA, 330 bp, Artificial Sequence
  source: /note="Description of Artificial Sequence: Synthetic polynucleotide"
aattttatgctgactcagccccactctgtgtcggggtctccggggaagacggtaaccatctcctgcacccgcagcagtggctacattgacagcaagtatgtgcagtggtaccagcagcgcccgggcagtgcccccaccactgtgatctatgaggataaccgaagaccctctggggtccctgatcggttctctggctccatcgacagctcctccaactctgcctccctcaccatctctggactggagactgaggacgaggctgactattactgtcagtcttatgatgacaccaatgtggtgttcggcggagggaccaaggtcaccgtccta

SEQ ID NO: 156 - DNA, 360 bp, Artificial Sequence
  source: /note="Description of Artificial Sequence: Synthetic polynucleotide"
gaggtccagctggtgcagtctggagctgaggtgaaggagcctggggcctcagtgaaggtctcctgcaaggcctctggttacgacttttccaactatggtttcagctgggtgcgccaggcccctggacaaggtcttgagtggatgggatggatcagctcttataatggttacacaaactatgcacagagactccagggcagagtcaccatgaccacagacacatccacgagcacagcctacatggagctgaggagcctgagatctgacgacacagctgtctattactgtgcgagagatcgaggacttggaaactggtacttcgatctctggggccaaggcaccctggtcaccgtctcgagt

SEQ ID NO: 157 - DNA, 330 bp, Artificial Sequence; identical to SEQ ID NO: 127
  source: /note="Description of Artificial Sequence: Synthetic polynucleotide"

SEQ ID NO: 158 - DNA, 1518 bp, Artificial Sequence
  source: /note="Description of Artificial Sequence: Synthetic polynucleotide"
atggattttcaagtgcagattttcagcttcctgctaatcagtgcttcagtcataatgtccagaggagatattcagatgacccagagcccgagcagcctgagcgcgagcgtgggcgatcgcgtgaccattacctgccgcgcgagccaggatgtgaacaccgcggtggcgtggtatcagcagaaaccgggcaaagcgccgaaactgctgatttatagcgcgagctttctgtatagcggcgtgccgagccgctttagcggcagccgcagcggcaccgattttaccctgaccattagcagcctgcagccggaagattttgcgacctattattgccagcagcattataccaccccgccgacctttggccagggcaccaaagtggaaattaaacgcaccgggggtggaggctctggtggcggtggctctggcggaggtggatccggtggcggcggatctgaagtgcagctggtggaaagcggcggcggcctggtgcagccgggcggcagcctgcgcctgagctgcgcggcgagcggctttaacattaaagatacctatattcattgggtgcgccaggcgccgggcaaaggcctggaatgggtggcgcgcatttatccgaccaacggctatacccgctatgcggatagcgtgaaaggccgctttaccattagcgcggataccagcaaaaacaccgcgtatctgcagatgaacagcctgcgcgcggaagataccgcggtgtattattgcagccgctggggcggcgatggcttttatgcgatggattattggggccagggcaccctggtgaccgtgagcagtgatcaggagcccaaatcttgtgacaaaactcacacatctccaccgtgctcagcacctgaactcctgggtggaccgtcagtcttcctcttccccccaaaacccaaggacaccctcatgatctcccggacccctgaggtcacatgcgtggtggtggacgtgagccacgaagaccctgaggtcaagttcaactggtacgtggacggcgtggaggtgcataatgccaagacaaagccgcgggaggagcagtacaacagcacgtaccgtgtggtcagcgtcctcaccgtcctgcaccaggactggctgaatggcaaggagtacaagtgcaaggtctccaacaaagccctcccagcccccatcgagaaaaccatctccaaagccaaagggcagccccgagaaccacaggtgtacaccctgcccccatcccgggatgagctgaccaagaaccaggtcagcctgacctgcctggtcaaaggcttctatccaagcgacatcgccgtggagtgggagagcaatgggcagccggagaacaactacaagaccacgcctcccgtgctggactccgacggctccttcttcctctacagcaagctcaccgtggacaagagcaggtggcagcaggggaacgtcttctcatgctccgtgatgcatgaggctctgcacaaccactacacgcagaagagcctctccctgtctccgggtaaatga

SEQ ID NO: 159 - protein, 505 aa, Artificial Sequence
  source: /note="Description of Artificial Sequence: Synthetic polypeptide"
MDFQVQIFSFLLISASVIMSRGDIQMTQSPSSLSASVGDRVTITCRASQDVNTAVAWYQQKPGKAPKLLIYSASFLYSGVPSRFSGSRSGTDFTLTISSLQPEDFATYYCQQHYTTPPTFGQGTKVEIKRTGGGGSGGGGSGGGGSGGGGSEVQLVESGGGLVQPGGSLRLSCAASGFNIKDTYIHWVRQAPGKGLEWVARIYPTNGYTRYADSVKGRFTISADTSKNTAYLQMNSLRAEDTAVYYCSRWGGDGFYAMDYWGQGTLVTVSSDQEPKSCDKTHTSPPCSAPELLGGPSVFLFPPKPKDTLMISRTPEVTCVVVDVSHEDPEVKFNWYVDGVEVHNAKTKPREEQYNSTYRVVSVLTVLHQDWLNGKEYKCKVSNKALPAPIEKTISKAKGQPREPQVYTLPPSRDELTKNQVSLTCLVKGFYPSDIAVEWESNGQPENNYKTTPPVLDSDGSFFLYSKLTVDKSRWQQGNVFSCSVMHEALHNHYTQKSLSLSPGK

SEQ ID NO: 160 - DNA, 66 bp, Artificial Sequence
  source: /note="Description of Artificial Sequence: Synthetic oligonucleotide"
atggattttcaagtgcagattttcagcttcctgctaatcagtgcttcagtcataatgtccagagga

SEQ ID NO: 161 - protein, 22 aa, Artificial Sequence
  source: /note="Description of Artificial Sequence: Synthetic peptide"
MDFQVQIFSFLLISASVIMSRG

SEQ ID NO: 162 - DNA, 327 bp, Artificial Sequence
  source: /note="Description of Artificial Sequence: Synthetic polynucleotide"
gatattcagatgacccagagcccgagcagcctgagcgcgagcgtgggcgatcgcgtgaccattacctgccgcgcgagccaggatgtgaacaccgcggtggcgtggtatcagcagaaaccgggcaaagcgccgaaactgctgatttatagcgcgagctttctgtatagcggcgtgccgagccgctttagcggcagccgcagcggcaccgattttaccctgaccattagcagcctgcagccggaagattttgcgacctattattgccagcagcattataccaccccgccgacctttggccagggcaccaaagtggaaattaaacgcacc

SEQ ID NO: 163 - protein, 109 aa, Artificial Sequence
  source: /note="Description of Artificial Sequence: Synthetic polypeptide"
DIQMTQSPSSLSASVGDRVTITCRASQDVNTAVAWYQQKPGKAPKLLIYSASFLYSGVPSRFSGSRSGTDFTLTISSLQPEDFATYYCQQHYTTPPTFGQGTKVEIKRT

SEQ ID NO: 164 - DNA, 60 bp, Artificial Sequence
  source: /note="Description of Artificial Sequence: Synthetic oligonucleotide"
gggggtggaggctctggtggcggtggctctggcggaggtggatccggtggcggcggatct

SEQ ID NO: 165 - protein, 20 aa, Artificial Sequence
  source: /note="Description of Artificial Sequence: Synthetic peptide"
GGGGSGGGGSGGGGSGGGGS

SEQ ID NO: 166 - DNA, 360 bp, Artificial Sequence
  source: /note="Description of Artificial Sequence: Synthetic polynucleotide"
gaagtgcagctggtggaaagcggcggcggcctggtgcagccgggcggcagcctgcgcctgagctgcgcggcgagcggctttaacattaaagatacctatattcattgggtgcgccaggcgccgggcaaaggcctggaatgggtggcgcgcatttatccgaccaacggctatacccgctatgcggatagcgtgaaaggccgctttaccattagcgcggataccagcaaaaacaccgcgtatctgcagatgaacagcctgcgcgcggaagataccgcggtgtattattgcagccgctggggcggcgatggcttttatgcgatggattattggggccagggcaccctggtgaccgtgagcagt

SEQ ID NO: 167 - protein, 120 aa, Artificial Sequence [sequence omitted]

SEQ ID NO: 168 - DNA, 45 bp, Artificial Sequence
  source: /note="Description of Artificial Sequence: Synthetic oligonucleotide"
gagcccaaatcttgtgacaaaactcacacatctccaccgtgctca

SEQ ID NO: 169 - protein, 15 aa, Artificial Sequence
  source: /note="Description of Artificial Sequence: Synthetic peptide"
EPKSCDKTHTSPPCS

SEQ ID NO: 170 - DNA, 654 bp, Artificial Sequence
  source: /note="Description of Artificial Sequence: Synthetic polynucleotide"
gcacctgaactcctgggtggaccgtcagtcttcctcttccccccaaaacccaaggacaccctcatgatctcccggacccctgaggtcacatgcgtggtggtggacgtgagccacgaagaccctgaggtcaagttcaactggtacgtggacggcgtggaggtgcataatgccaagacaaagccgcgggaggagcagtacaacagcacgtaccgtgtggtcagcgtcctcaccgtcctgcaccaggactggctgaatggcaaggagtacaagtgcaaggtctccaacaaagccctcccagcccccatcgagaaaaccatctccaaagccaaagggcagccccgagaaccacaggtgtacaccctgcccccatcccgggatgagctgaccaagaaccaggtcagcctgacctgcctggtcaaaggcttctatccaagcgacatcgccgtggagtgggagagcaatgggcagccggagaacaactacaagaccacgcctcccgtgctggactccgacggctccttcttcctctacagcaagctcaccgtggacaagagcaggtggcagcaggggaacgtcttctcatgctccgtgatgcatgaggctctgcacaaccactacacgcagaagagcctctccctgtctccgggtaaatga

SEQ ID NO: 171 - protein, 217 aa, Artificial Sequence
  source: /note="Description of Artificial Sequence: Synthetic polypeptide"
APELLGGPSVFLFPPKPKDTLMISRTPEVTCVVVDVSHEDPEVKFNWYVDGVEVHNAKTKPREEQYNSTYRVVSVLTVLHQDWLNGKEYKCKVSNKALPAPIEKTISKAKGQPREPQVYTLPPSRDELTKNQVSLTCLVKGFYPSDIAVEWESNGQPENNYKTTPPVLDSDGSFFLYSKLTVDKSRWQQGNVFSCSVMHEALHNHYTQKSLSLSPGK

SEQ ID NO: 172 - DNA, 1503 bp, Artificial Sequence
  source: /note="Description of Artificial Sequence: Synthetic polynucleotide"
atggaagcaccagcgcagcttctcttcctcctgctactctggctcccagataccaccggtgaggtgcagctggtgcagtctgggtctgaggtgaggaggcctgggtcctcggtgagggtctcctgcacggcttctggagacacctccagcagctttaccgtcaactggctgcgacaggcccctggacaaggtcttgagtggatgggagggatcacccctatgtttggcactgcaaactacgcacagatgttcgaggacagagtcacgataaccgcggacgaaatggaactgagtggcctgacatctgaggacacggccgtgtatttttgtgcgacaggcccctccgattacgtttgggggagttatcgtttccttgacacctgggggcgggggaccacggtcaccgtctcgagtggaggcggcggttcaggcggaggtggctctggcggtggcggaagtgcacaggctgtgctgactcagccgtcctcagtgtctgcggccccaggacaggaggtctccatctcctgctctggagccagatccaacgttgggggtaattatgtttcctggtaccaacacctcccaggaacagcccccaaactcctcatttatgacaataataagcgaccctcagggatgcctgaccgattctctggctccaagtctggcacgtcagccaccctgggcatcaccggagtccagactgaggacgaggccgattattactgcgcaacatgggatagcagcctgagcgctgtggtcttcggcggagggaccaagctgaccgtcctaggtgacgtacgcgagcccaaatcttctgacaaaactcacacatgcccaccgtgcccagcacctgaactcctgggtggaccgtcagtcttcctcttccccccaaaacccaaggacaccctcatgatctcccggacccctgaggtcacatgcgtggtggtggacgtgagccacgaagaccctgaggtcaagttcaactggtacgtggacggcgtggaggtgcataatgccaagacaaagccgcgggaggagcagtacaacagcacgtaccgtgtggtcagcgtcctcaccgtcctgcaccaggactggctgaatggcaaggagtacaagtgcaaggtctccaacaaagccctcccagcccccatcgagaaaaccatctccaaagccaaagggcagccccgagaaccacaggtgtacaccctgcccccatcccgggatgagctgaccaagaaccaggtcagcctgacctgcctggtcaaaggcttctatccaagcgacatcgccgtggagtgggagagcaatgggcagccggagaacaactacaagaccacgcctcccgtgctggactccgacggctccttcttcctctacagcaagctcaccgtggacaagagcaggtggcagcaggggaacgtcttctcatgctccgtgatgcatgaggctctgcacaaccactacacgcagaagagcctctccctgtctccgggtaaatga

SEQ ID NO: 173 - protein, 500 aa, Artificial Sequence
  source: /note="Description of Artificial Sequence: Synthetic polypeptide"
MEAPAQLLFLLLLWLPDTTGEVQLVQSGSEVRRPGSSVRVSCTASGDTSSSFTVNWLRQAPGQGLEWMGGITPMFGTANYAQMFEDRVTITADEMELSGLTSEDTAVYFCATGPSDYVWGSYRFLDTWGRGTTVTVSSGGGGSGGGGSGGGGSAQAVLTQPSSVSAAPGQEVSISCSGARSNVGGNYVSWYQHLPGTAPKLLIYDNNKRPSGMPDRFSGSKSGTSATLGITGVQTEDEADYYCATWDSSLSAVVFGGGTKLTVLGDVREPKSSDKTHTCPPCPAPELLGGPSVFLFPPKPKDTLMISRTPEVTCVVVDVSHEDPEVKFNWYVDGVEVHNAKTKPREEQYNSTYRVVSVLTVLHQDWLNGKEYKCKVSNKALPAPIEKTISKAKGQPREPQVYTLPPSRDELTKNQVSLTCLVKGFYPSDIAVEWESNGQPENNYKTTPPVLDSDGSFFLYSKLTVDKSRWQQGNVFSCSVMHEALHNHYTQKSLSLSPGK

SEQ ID NO: 174 - DNA, 1503 bp, Artificial Sequence
  source: /note="Description of Artificial Sequence: Synthetic polynucleotide"
atggaagcaccagcgcagcttctcttcctcctgctactctggctcccagataccaccggtcaggtgcagctggtgcagtctgggtctgaggtgaggaggcctgggtcctcggtgaggatctcctgcacggcttctggagacacctccagcagctttaccgtcaactgggtgcgacaggcccctggacaaggtcttgagtggatgggagggatcacccctatgtttggcactgcaaactacgcacaggtgttcgaggacagagtcacaataatcgcggacgagatggaactgagtggcctgacatctgaggacacggccgtgtatttctgtgcgacaggcccctccgattacgtttgggggagttatcgtttccttgacaactggggcaggggcaccctggtcaccgtctcgagtggaggcggcggttcaggcggaggtggctctggcggtggcggaagtgcacagtctgtgctgactcagccaccctcagtgtctgcggccccagggcagaaggtcaccatctcctgctctggaggcaggtccagcattgggaataattatgtgtcctggtatcaacacctcccaggaacagcccccaaactcctcatctatgacaataatcagcgaccctcagggattcctgaccgattctctggctccaagtctggcacgtcagccaccctgggcatcaccggactccagactggggacgaggccgattattactgcggaacatgggatagcagcctgagtgctgtggtgtttggcggagggaccaaggtcaccgtcctaggtgacgtacgcgagcccaaatcttctgacaaaactcacacatgcccaccgtgcccagcacctgaactcctgggtggaccgtcagtcttcctcttccccccaaaacccaaggacaccctcatgatctcccggacccctgaggtcacatgcgtggtggtggacgtgagccacgaagaccctgaggtcaagttcaactggtacgtggacggcgtggaggtgcataatgccaagacaaagccgcgggaggagcagtacaacagcacgtaccgtgtggtcagcgtcctcaccgtcctgcaccaggactggctgaatggcaaggagtacaagtgcaaggtctccaacaaagccctcccagcccccatcgagaaaaccatctccaaagccaaagggcagccccgagaaccacaggtgtacaccctgcccccatcccgggatgagctgaccaagaaccaggtcagcctgacctgcctggtcaaaggcttctatccaagcgacatcgccgtggagtgggagagcaatgggcagccggagaacaactacaagaccacgcctcccgtgctggactccgacggctccttcttcctctacagcaagctcaccgtggacaagagcaggtggcagcaggggaacgtcttctcatgctccgtgatgcatgaggctctgcacaaccactacacgcagaagagcctctccctgtctccgggtaaatga

SEQ ID NO: 175 - protein, 500 aa, Artificial Sequence
  source: /note="Description of Artificial Sequence: Synthetic polypeptide"
MEAPAQLLFLLLLWLPDTTGQVQLVQSGSEVRRPGSSVRISCTASGDTSSSFTVNWVRQAPGQGLEWMGGITPMFGTANYAQVFEDRVTIIADEMELSGLTSEDTAVYFCATGPSDYVWGSYRFLDNWGRGTLVTVSSGGGGSGGGGSGGGGSAQSVLTQPPSVSAAPGQKVTISCSGGRSSIGNNYVSWYQHLPGTAPKLLIYDNNQRPSGIPDRFSGSKSGTSATLGITGLQTGDEADYYCGTWDSSLSAVVFGGGTKVTVLGDVREPKSSDKTHTCPPCPAPELLGGPSVFLFPPKPKDTLMISRTPEVTCVVVDVSHEDPEVKFNWYVDGVEVHNAKTKPREEQYNSTYRVVSVLTVLHQDWLNGKEYKCKVSNKALPAPIEKTISKAKGQPREPQVYTLPPSRDELTKNQVSLTCLVKGFYPSDIAVEWESNGQPENNYKTTPPVLDSDGSFFLYSKLTVDKSRWQQGNVFSCSVMHEALHNHYTQKSLSLSPGK

SEQ ID NO: 176 - DNA, 1515 bp, Artificial Sequence
  source: /note="Description of Artificial Sequence: Synthetic polynucleotide"
atggaagcaccagcgcagcttctcttcctcctgctactctggctcccagataccaccggtgaagtgcagctggtgcagtctggggctgaggtgaagaagcctggggcctcagtgaaggtctcctgcaaggcttctgggtacagcttcaccgccttctatattcactgggtgcgacaggcccctggacaaggccttgagtatttgggatggatcgaccctaatactggtgccacaaaatatgcacagcgctttcagggcagggtcatcatgacctgggacacgtccatcaccacagccaccatggaactgagcaggctgacgtctgacgactcggccgtctactactgtgtgagagatttgcgggagtggggctacgaattgtccgttgagtattggggcagaggaaccctggtcaccgtctcgagtggaggcggcggttcaggcggaggtggctctggcggtggcggaagtgcacagtctgtgctgactcagccaccctcagcgtctgggacccccgggcagagggtcaccatctcttgttctggaagcagctccaacatcggaagtaattatgtatactggtaccagcagctcccaggaacggcccccaaactcctcatctataggaataatcagcggccctcaggggtccctgaccgattctctggctccaagtctggcacctcagcctccctggccatcagtgggctccggtccgaggatgaggctgattattactgtgcagcatgggatgacagcctgagtggttgggtgttcggcggagggaccaagctgaccgtcctaggtgacgtacgcgagcccaaatcttctgacaaaactcacacatgcccaccgtgcccagcacctgaactcctgggtggaccgtcagtcttcctcttccccccaaaacccaaggacaccctcatgatctcccggacccctgaggtcacatgcgtggtggtggacgtgagccacgaagaccctgaggtcaagttcaactggtacgtggacggcgtggaggtgcataatgccaagacaaagccgcgggaggagcagtacaacagcacgtaccgtgtggtcagcgtcctcaccgtcctgcaccaggactggctgaatggcaaggagtacaagtgcaaggtctccaacaaagccctcccagcccccatcgagaaaaccatctccaaagccaaagggcagccccgagaaccacaggtgtacaccctgcccccatcccgggatgagctgaccaagaaccaggtcagcctgacctgcctggtcaaaggcttctatccaagcgacatcgccgtggagtgggagagcaatgggcagccggagaacaactacaagaccacgcctcccgtgctggactccgacggctccttcttcctctacagcaagctcaccgtggacaagagcaggtggcagcaggggaacgtcttctcatgctccgtgatgcatgaggctctgcacaaccactacacgcagaagagcctctccctgtctccgggtaaatga

SEQ ID NO: 177 - protein, 504 aa, Artificial Sequence
  source: /note="Description of Artificial Sequence: Synthetic polypeptide"
MEAPAQLLFLLLLWLPDTTGEVQLVQSGAEVKKPGASVKVSCKASGYSFTAFYIHWVRQAPGQGLEYLGWIDPNTGATKYAQRFQGRVIMTWDTSITTATMELSRLTSDDSAVYYCVRDLREWGYELSVEYWGRGTLVTVSSGGGGSGGGGSGGGGSAQSVLTQPPSASGTPGQRVTISCSGSSSNIGSNYVYWYQQLPGTAPKLLIYRNNQRPSGVPDRFSGSKSGTSASLAISGLRSEDEADYYCAAWDDSLSGWVFGGGTKLTVLGDVREPKSSDKTHTCPPCPAPELLGGPSVFLFPPKPKDTLMISRTPEVTCVVVDVSHEDPEVKFNWYVDGVEVHNAKTKPREEQYNSTYRVVSVLTVLHQDWLNGKEYKCKVSNKALPAPIEKTISKAKGQPREPQVYTLPPSRDELTKNQVSLTCLVKGFYPSDIAVEWESNGQPENNYKTTPPVLDSDGSFFLYSKLTVDKSRWQQGNVFSCSVMHEALHNHYTQKSLSLSPGK

SEQ ID NO: 178 - DNA, 1503 bp, Artificial Sequence
  source: /note="Description of Artificial Sequence: Synthetic polynucleotide"
atggaagcaccagcgcagcttctcttcctcctgctactctggctcccagataccaccggtgaggtgcagctggtgcagtctggggctgaggtgaagaagcctggggcctcagtgaaggtctcctgcaaggcttctggatacaccttcaccggctactatatgcactgggtgcgacaggcccctggacaagggcttgagtggatgggatggatcaaccctaacagtggtggcacaaactatgcacagaagtttcagggctgggtcaccatgaccagggacacgtccatcagcacagcctacatggagctgagcaggctgagatctgacgacacggccgtgtattactgtgcgagagattctactatggccccaggtgcttttgatatctggggccgaggcaccctggtcaccgtctcgagtggaggcggcggttcaggcggaggtggctctggcggtggcggaagtgcacagtctgtgctgactcagccaccctcggtgtcagtggccccaggacagacggccaggatgacctgtgggggaaacaacattgaaagtaaaactgtgcattggtaccagcagaagccgggccaggcccctgtgctggtcgtctacaatgataacgtccggccctcagggatccctgcgcgattctctggctccaactccggcaacacggccaccctgaccatcaacagggtcgaagccggggatgaggccgactattattgtcaggtgtgggactccagtagagatcaaggggtattcggcggagggaccaagctgaccgtcctaggtgacgtacgcgagcccaaatcttctgacaaaactcacacatgcccaccgtgcccagcacctgaactcctgggtggaccgtcagtcttcctcttccccccaaaacccaaggacaccctcatgatctcccggacccctgaggtcacatgcgtggtggtggacgtgagccacgaagaccctgaggtcaagttcaactggtacgtggacggcgtggaggtgcataatgccaagacaaagccgcgggaggagcagtacaacagcacgtaccgtgtggtcagcgtcctcaccgtcctgcaccaggactggctgaatggcaaggagtacaagtgcaaggtctccaacaaagccctcccagcccccatcgagaaaaccatctccaaagccaaagggcagccccgagaaccacaggtgtacaccctgcccccatcccgggatgagctgaccaagaaccaggtcagcctgacctgcctggtcaaaggcttctatccaagcgacatcgccgtggagtgggagagcaatgggcagccggagaacaactacaagaccacgcctcccgtgctggactccgacggctccttcttcctctacagcaagctcaccgtggacaagagcaggtggcagcaggggaacgtcttctcatgctccgtgatgcatgaggctctgcacaaccactacacgcagaagagcctctccctgtctccgggtaaatga

SEQ ID NO: 179 - protein, 500 aa, Artificial Sequence
  source: /note="Description of Artificial Sequence: Synthetic polypeptide"
MEAPAQLLFLLLLWLPDTTGEVQLVQSGAEVKKPGASVKVSCKASGYTFTGYYMHWVRQAPGQGLEWMGWINPNSGGTNYAQKFQGWVTMTRDTSISTAYMELSRLRSDDTAVYYCARDSTMAPGAFDIWGRGTLVTVSSGGGGSGGGGSGGGGSAQSVLTQPPSVSVAPGQTARMTCGGNNIESKTVHWYQQKPGQAPVLVVYNDNVRPSGIPARFSGSNSGNTATLTINRVEAGDEADYYCQVWDSSRDQGVFGGGTKLTVLGDVREPKSSDKTHTCPPCPAPELLGGPSVFLFPPKPKDTLMISRTPEVTCVVVDVSHEDPEVKFNWYVDGVEVHNAKTKPREEQYNSTYRVVSVLTVLHQDWLNGKEYKCKVSNKALPAPIEKTISKAKGQPREPQVYTLPPSRDELTKNQVSLTCLVKGFYPSDIAVEWESNGQPENNYKTTPPVLDSDGSFFLYSKLTVDKSRWQQGNVFSCSVMHEALHNHYTQKSLSLSPGK

SEQ ID NO: 180 - DNA, 1503 bp, Artificial Sequence
  source: /note="Description of Artificial Sequence: Synthetic polynucleotide"
atggaagcaccagcgcagcttctcttcctcctgctactctggctcccagataccaccggtgaggtgcagctggtgcagtctgggggaggcttggtcaggcctggagggtccctgagactctcctgtgcagcctcgggattctccttcagtgactactacatgacctggatccgccagattccagggaaggggctggagtgggtggcagttatatggaatgatggaagtgatagatactatgcagactccgtgaagggccgattcaccatttccagagacaattccaagaacacgctgtttctgcaaatgagcagcctgagagacgaggacacggctctatattactgtgtgagagggggaccaacagcttcaagcggatttgactactggggccgaggcaccctggtcaccgtctcgagtggtggaggcggttcaggcggaggtggcagcggcggtggcggatcgtctgagctgactcagcctgcctccgtgtctgggtctcctggacagtcgatcaccatctcctgcactggaaccagcagtgacgttggtggttataactatgtctcctggtacctacaacacccaggcaaagcccccaaactcatgatttatgagggcagtaagcggccctcaggggtttctaatcgcttctctggctccaagtctggcaacacggcctccctgacaatctctgggctccaggctgaggacgaggctgattattactgcagctcatatacaaccaggagcactcgagttttcggcggagggaccaagctgaccgtcctaggtgacgtacgcgagcccaaatcttctgacaaaactcacacatgcccaccgtgcccagcacctgaactcctgggtggaccgtcagtcttcctcttccccccaaaacccaaggacaccctcatgatctcccggacccctgaggtcacatgcgtggtggtggacgtgagccacgaagaccctgaggtcaagttcaactggtacgtggacggcgtggaggtgcataatgccaagacaaagccgcgggaggagcagtacaacagcacgtaccgtgtggtcagcgtcctcaccgtcctgcaccaggactggctgaatggcaaggagtacaagtgcaaggtctccaacaaagccctcccagcccccatcgagaaaaccatctccaaagccaaagggcagccccgagaaccacaggtgtacaccctgcccccatcccgggatgagctgaccaagaaccaggtcagcctgacctgcctggtcaaaggcttctatccaagcgacatcgccgtggagtgggagagcaatgggcagccggagaacaactacaagaccacgcctcccgtgctggactccgacggctccttcttcctctacagcaagctcaccgtggacaagagcaggtggcagcaggggaacgtcttctcatgctccgtgatgcatgaggctctgcacaaccactacacgcagaagagcctctccctgtctccgggtaaatga

SEQ ID NO: 181 - protein, 500 aa, Artificial Sequence
  source: /note="Description of Artificial Sequence: Synthetic polypeptide"
MEAPAQLLFLLLLWLPDTTGEVQLVQSGGGLVRPGGSLRLSCAASGFSFSDYYMTWIRQIPGKGLEWVAVIWNDGSDRYYADSVKGRFTISRDNSKNTLFLQMSSLRDEDTALYYCVRGGPTASSGFDYWGRGTLVTVSSGGGGSGGGGSGGGGSSELTQPASVSGSPGQSITISCTGTSSDVGGYNYVSWYLQHPGKAPKLMIYEGSKRPSGVSNRFSGSKSGNTASLTISGLQAEDEADYYCSSYTTRSTRVFGGGTKLTVLGDVREPKSSDKTHTCPPCPAPELLGGPSVFLFPPKPKDTLMISRTPEVTCVVVDVSHEDPEVKFNWYVDGVEVHNAKTKPREEQYNSTYRVVSVLTVLHQDWLNGKEYKCKVSNKALPAPIEKTISKAKGQPREPQVYTLPPSRDELTKNQVSLTCLVKGFYPSDIAVEWESNGQPENNYKTTPPVLDSDGSFFLYSKLTVDKSRWQQGNVFSCSVMHEALHNHYTQKSLSLSPGK

SEQ ID NO: 182 - DNA, 1503 bp, Artificial Sequence
  source: /note="Description of Artificial Sequence: Synthetic polynucleotide"
atggaagcaccagcgcagcttctcttcctcctgctactctggctcccagataccaccggtcaggtgcagctgcaggagtcgggtccaggactggtgaagccctcgcagaccttgtcactcacctgtggcatctccggggacagtgtctctagcaacagtgctgcttggaactggatcaggcagtccccaacgagaggccttgagtggctgggaaggacatattacaggtccagttggtatcataactatgcaccttctatgaacagtcgattaaccatcatcgcagacacatccaaaaaccagttctctttgcaactgaactctgtgactcccgaggacacggctgtatattactgtgcaagcgggtgggcctttgatgtctggggcaggggaaccctggtcaccgtctcgagtggaggcggcggttcaggcggaggtggctctggcggtggcggaagtgcacagtctgtgctgactcagccaccctccgcgtccgggtctcctggacagtcagtcaccatctcctgcactggaaccagcagtgacgttggtgcttatgactttgtctcctggtaccaacagcaccctggcaaagcccccaaactcatgatttatgaggtcaataagcggccctcaggggtccctgatcgcttctctggctccaagtctggcaacacggcctccctgaccgtctctgggctccaggctgaggatgaggctgattattactgcagctcatatgcaggcagcaagaatttgcttttcggcggagggaccaagctgaccgtcctaggtgacgtacgcgagcccaaatcttctgacaaaactcacacatgcccaccgtgcccagcacctgaactcctgggtggaccgtcagtcttcctcttccccccaaaacccaaggacaccctcatgatctcccggacccctgaggtcacatgcgtggtggtggacgtgagccacgaagaccctgaggtcaagttcaactggtacgtggacggcgtggaggtgcataatgccaagacaaagccgcgggaggagcagtacaacagcacgtaccgtgtggtcagcgtcctcaccgtcctgcaccaggactggctgaatggcaaggagtacaagtgcaaggtctccaacaaagccctcccagcccccatcgagaaaaccatctccaaagccaaagggcagccccgagaaccacaggtgtacaccctgcccccatcccgggatgagctgaccaagaaccaggtcagcctgacctgcctggtcaaaggcttctatccaagcgacatcgccgtggagtgggagagcaatgggcagccggagaacaactacaagaccacgcctcccgtgctggactccgacggctccttcttcctctacagcaagctcaccgtggacaagagcaggtggcagcaggggaacgtcttctcatgctccgtgatgcatgaggctctgcacaaccactacacgcagaagagcctctccctgtctccgggtaaatga

SEQ ID NO: 183 - protein, 500 aa, Artificial Sequence
  source: /note="Description of Artificial Sequence: Synthetic polypeptide"
MEAPAQLLFLLLLWLPDTTGQVQLQESGPGLVKPSQTLSLTCGISGDSVSSNSAAWNWIRQSPTRGLEWLGRTYYRSSWYHNYAPSMNSRLTIIADTSKNQFSLQLNSVTPEDTAVYYCASGWAFDVWGRGTLVTVSSGGGGSGGGGSGGGGSAQSVLTQPPSASGSPGQSVTISCTGTSSDVGAYDFVSWYQQHPGKAPKLMIYEVNKRPSGVPDRFSGSKSGNTASLTVSGLQAEDEADYYCSSYAGSKNLLFGGGTKLTVLGDVREPKSSDKTHTCPPCPAPELLGGPSVFLFPPKPKDTLMISRTPEVTCVVVDVSHEDPEVKFNWYVDGVEVHNAKTKPREEQYNSTYRVVSVLTVLHQDWLNGKEYKCKVSNKALPAPIEKTISKAKGQPREPQVYTLPPSRDELTKNQVSLTCLVKGFYPSDIAVEWESNGQPENNYKTTPPVLDSDGSFFLYSKLTVDKSRWQQGNVFSCSVMHEALHNHYTQKSLSLSPGK

SEQ ID NO: 184 - DNA, 1506 bp, Artificial Sequence
  source: /note="Description of Artificial Sequence: Synthetic polynucleotide"
atggaagcaccagcgcagcttctcttcctcctgctactctggctcccagataccaccggtgaggtgcagctgttggagtctgggggaggcttggtacagcctggggggtccctgagactctcctgtgcagcctctggattcacctttagcagctatgccatgagctgggtccgccaggctccagggaaggggctggagtgggtctcagctattagtggtagtggtggtagcacatactacgcagactccgtgaagggccggttcaccatctccagagacaattccaagaacacgctgtatctgcaaatgaacagcctgagagccgaggacacggccgtgtattactgtgcgagaggatacagtggctacgatgaccctgactcctgggggagagggaccacggtcaccgtctcgagtggaggcggcggttcaggcggaggtggctctggcggtggcggaagtgcacacgttatactgactcaaccgccctcaacgtctgggacccccgggcagacggtcaccatctcttgttctgggagcagctccaacatcggaagtcattatgtatactggtaccagcagctcccaggaacggcccccaaactcctcatctataggaataatcagcggccctcaggggtccctgaccgattctctggctccaagtctggcacctcagcctccctggccatcagtgggctccggtccgaggatgagactgattattactgtgcagcatgggatgacagcctgagtggtcgagtcttcggaactgggaccaagctgaccgtcctaggtgacgtacgcgagcccaaatcttctgacaaaactcacacatgcccaccgtgcccagcacctgaactcctgggtggaccgtcagtcttcctcttccccccaaaacccaaggacaccctcatgatctcccggacccctgaggtcacatgcgtggtggtggacgtgagccacgaagaccctgaggtcaagttcaactggtacgtggacggcgtggaggtgcataatgccaagacaaagccgcgggaggagcagtacaacagcacgtaccgtgtggtcagcgtcctcaccgtcctgcaccaggactggctgaatggcaaggagtacaagtgcaaggtctccaacaaagccctcccagcccccatcgagaaaaccatctccaaagccaaagggcagccccgagaaccacaggtgtacaccctgcccccatcccgggatgagctgaccaagaaccaggtcagcctgacctgcctggtcaaaggcttctatccaagcgacatcgccgtggagtgggagagcaatgggcagccggagaacaactacaagaccacgcctcccgtgctggactccgacggctccttcttcctctacagcaagctcaccgtggacaagagcaggtggcagcaggggaacgtcttctcatgctccgtgatgcatgaggctctgcacaaccactacacgcagaagagcctctccctgtctccgggtaaatga

SEQ ID NO: 185 - protein, 501 aa, Artificial Sequence
  source: /note="Description of Artificial Sequence: Synthetic polypeptide"
MEAPAQLLFLLLLWLPDTTGEVQLLESGGGLVQPGGSLRLSCAASGFTFSSYAMSWVRQAPGKGLEWVSAISGSGGSTYYADSVKGRFTISRDNSKNTLYLQMNSLRAEDTAVYYCARGYSGYDDPDSWGRGTTVTVSSGGGGSGGGGSGGGGSAHVILTQPPSTSGTPGQTVTISCSGSSSNIGSHYVYWYQQLPGTAPKLLIYRNNQRPSGVPDRFSGSKSGTSASLAISGLRSEDETDYYCAAWDDSLSGRVFGTGTKLTVLGDVREPKSSDKTHTCPPCPAPELLGGPSVFLFPPKPKDTLMISRTPEVTCVVVDVSHEDPEVKFNWYVDGVEVHNAKTKPREEQYNSTYRVVSVLTVLHQDWLNGKEYKCKVSNKALPAPIEKTISKAKGQPREPQVYTLPPSRDELTKNQVSLTCLVKGFYPSDIAVEWESNGQPENNYKTTPPVLDSDGSFFLYSKLTVDKSRWQQGNVFSCSVMHEALHNHYTQKSLSLSPGK

SEQ ID NO: 186 - DNA, 1497 bp, Artificial Sequence
  source: /note="Description of Artificial Sequence: Synthetic polynucleotide"
atggaagcaccagcgcagcttctcttcctcctgctactctggctcccagataccaccggtcaggtacagctgcagcagtcaggggctgaggtgaagaagcctgggtcctcggtgaaggtctcctgcaaggcttctggaggcaccatcagcaactatgctatcagttgggtgcggctggcccctggacaaggtcttgagtggatgggaagtatcgtccctcttcatgggacaacaaacttcgcacagaaattccagggcagagtcacgatcaccgcggacgagtccacgagcacatcctacatggaggtgaacgtcctgacatatgaagacacggcgatgtattattgtgcgtctctcaattggggctactggggccggggcaccctggtcaccgtctcgagtggaggcggcggttcaggcggaggtggctctggcggtggcggaagtgcacttaattttatgctgactcagccccactctgtgtcggagtctccggggaagacggtaaccatctcctgcaccggcagtagtggcagcattgccagcaactatgtgcagtggtaccagcagcgcccggacagtgcccccaccactgtgatctatgaggataatcgaagatcctctggagtccctgatcggttctctggctccatcgacagctcctccaactctgcctccctcagcatctctggactgaagactgaggacgaggctgactactactgtcagtcctatgatagtagcggtcatgtggtcttcggcggagggaccaagctgaccgtcctaggtgacgtacgcgagcccaaatcttctgacaaaactcacacatgcccaccgtgcccagcacctgaactcctgggtggaccgtcagtcttcctcttccccccaaaacccaaggacaccctcatgatctcccggacccctgaggtcacatgcgtggtggtggacgtgagccacgaagaccctgaggtcaagttcaactggtacgtggacggcgtggaggtgcataatgccaagacaaagccgcgggaggagcagtacaacagcacgtaccgtgtggtcagcgtcctcaccgtcctgcaccaggactggctgaatggcaaggagtacaagtgcaaggtctccaacaaagccctcccagcccccatcgagaaaaccatctccaaagccaaagggcagccccgagaaccacaggtgtacaccctgcccccatcccgggatgagctgaccaagaaccaggtcagcctgacctgcctggtcaaaggcttctatccaagcgacatcgccgtggagtgggagagcaatgggcagccggagaacaactacaagaccacgcctcccgtgctggactccgacggctccttcttcctctacagcaagctcaccgtggacaagagcaggtggcagcaggggaacgtcttctcatgctccgtgatgcatgaggctctgcacaaccactacacgcagaagagcctctccctgtctccgggtaaatga

SEQ ID NO: 187 - protein, 498 aa, Artificial Sequence
  source: /note="Description of Artificial Sequence: Synthetic polypeptide"
MEAPAQLLFLLLLWLPDTTGQVQLQQSGAEVKKPGSSVKVSCKASGGTISNYAISWVRLAPGQGLEWMGSIVPLHGTTNFAQKFQGRVTITADESTSTSYMEVNVLTYEDTAMYYCASLNWGYWGRGTLVTVSSGGGGSGGGGSGGGGSALNFMLTQPHSVSESPGKTVTISCTGSSGSIASNYVQWYQQRPDSAPTTVIYEDNRRSSGVPDRFSGSIDSSSNSASLSISGLKTEDEADYYCQSYDSSGHVVFGGGTKLTVLGDVREPKSSDKTHTCPPCPAPELLGGPSVFLFPPKPKDTLMISRTPEVTCVVVDVSHEDPEVKFNWYVDGVEVHNAKTKPREEQYNSTYRVVSVLTVLHQDWLNGKEYKCKVSNKALPAPIEKTISKAKGQPREPQVYTLPPSRDELTKNQVSLTCLVKGFYPSDIAVEWESNGQPENNYKTTPPVLDSDGSFFLYSKLTVDKSRWQQGNVFSCSVMHEALHNHYTQKSLSLSPGK

SEQ ID NO: 188 - DNA, 1506 bp, Artificial Sequence
  source: /note="Description of Artificial Sequence: Synthetic polynucleotide"
atggaagcaccagcgcagcttctcttcctcctgctactctggctcccagataccaccggtgaggtgcagctggtgcagtctggggcagaggtgaaaaagcccggggagtctctgaagatctcctgtaagggttttggatacaattttcgcagcgcctggatcggctgggtgcgccagatgcccggcaaaggcctggagtggatgggggtcatctatcctggtgactctgatgtcagatacagtccgtccttccaaggccaggtcaccatctcagccgacaagtccatcagtaccgcctacctgcagtggagcagcctgaaagcctcggacaccgccatgtattattgtacgagacccgtagggcagtgggtggactctgactattggggcaagggaaccctggtcaccgtctcgagtggaggcggcggttcaggcggaggtggctctggcggtggcggaagtgcacagtctgtgttgacgcagccgccctcagcgtctgggacccccggacagagggtcaccatctcttgttctggaagcagctccaacatcggaactaatactgtgaactggtaccagcagcttccaggaacggcccccaaactcctcatctatactagtaatcagcggccctcaggggtccctgcccgcttctctgcctccaactctggcacctcagcctccctggccatcagtgggctccggtccgaggatgaggctgattattattgtgcagcgtgggatgacaagttgagtggtgcggtgttcggcggagggaccaagctgaccgtcctaggtgacgtacgcgagcccaaatcttctgacaaaactcacacatgcccaccgtgcccagcacctgaactcctgggtggaccgtcagtcttcctcttccccccaaaacccaaggacaccctcatgatctcccggacccctgaggtcacatgcgtggtggtggacgtgagccacgaagaccctgaggtcaagttcaactggtacgtggacggcgtggaggtgcataatgccaagacaaagccgcgggaggagcagtacaacagcacgtaccgtgtggtcagcgtcctcaccgtcctgcaccaggactggctgaatggcaaggagtacaagtgcaaggtctccaacaaagccctcccagcccccatcgagaaaaccatctccaaagccaaagggcagccccgagaaccacaggtgtacaccctgcccccatcccgggatgagctgaccaagaaccaggtcagcctgacctgcctggtcaaaggcttctatccaagcgacatcgccgtggagtgggagagcaatgggcagccggagaacaactacaagaccacgcctcccgtgctggactccgacggctccttcttcctctacagcaagctcaccgtggacaagagcaggtggcagcaggggaacgtcttctcatgctccgtgatgcatgaggctctgcacaaccactacacgcagaagagcctctccctgtctccgggtaaatga

SEQ ID NO: 189 - protein, 501 aa, Artificial Sequence
  source: /note="Description of Artificial Sequence: Synthetic polypeptide"
MEAPAQLLFLLLLWLPDTTGEVQLVQSGAEVKKPGESLKISCKGFGYNFRSAWIGWVRQMPGKGLEWMGVIYPGDSDVRYSPSFQGQVTISADKSISTAYLQWSSLKASDTAMYYCTRPVGQWVDSDYWGKGTLVTVSSGGGGSGGGGSGGGGSAQSVLTQPPSASGTPGQRVTISCSGSSSNIGTNTVNWYQQLPGTAPKLLIYTSNQRPSGVPARFSASNSGTSASLAISGLRSEDEADYYCAAWDDKLSGAVFGGGTKLTVLGDVREPKSSDKTHTCPPCPAPELLGGPSVFLFPPKPKDTLMISRTPEVTCVVVDVSHEDPEVKFNWYVDGVEVHNAKTKPREEQYNSTYRVVSVLTVLHQDWLNGKEYKCKVSNKALPAPIEKTISKAKGQPREPQVYTLPPSRDELTKNQVSLTCLVKGFYPSDIAVEWESNGQPENNYKTTPPVLDSDGSFFLYSKLTVDKSRWQQGNVFSCSVMHEALHNHYTQKSLSLSPGK

SEQ ID NO: 190 - DNA, 1509 bp, Artificial Sequence
  source: /note="Description of Artificial Sequence: Synthetic polynucleotide"
atggaagcaccagcgcagcttctcttcctcctgctactctggctcccagataccaccggtgaggtgcagctgttggagtctgggggaggcttggtacagcctggggggtccctgagactctcctgtgcagcctctggattcacctttagcagctatgccatgagctgggtccgccaggctccagggaaggggctggagtgggtctcagctattagtggtagtggtggtagcacatactacgcagactccgtgaagggccggttcaccatctccagagacaattccaagaacacgctgtatctgcaaatgaacagcctgagagccgaggacacggccgtgtattactgtgcgagacagtcgggcgcggactggtacttcgatctctggggccgaggcaccctggtcaccgtctcgagtggaggcggcggttcaggcggaggtggctctggcggtggcggaagtgcacaggctgtgctgactcagccgtccgcagtttctggggccccagggcagagggtcaccatctcctgcactgggaccagctccaacatcgggacaaactatcttgtacactggtatcagcaacgtccaggaacagccccccaactcctcgtctctggtaacaacactcgaccctctggggtcactgaccggttctctgtctccaagtctgccacttcagcctccctggccatcactgggctccaggctgaggatgaggctgattattactgccagacctatgacatcaacttgagggtttgggtgttcggcggagggaccaaggtcaccgtcctaggtgacgtacgcgagcccaaatcttctgacaaaactcacacatgcccaccgtgcccagcacctgaactcctgggtggaccgtcagtcttcctcttccccccaaaacccaaggacaccctcatgatctcccggacccctgaggtcacatgcgtggtggtggacgtgagccacgaagaccctgaggtcaagttcaactggtacgtggacggcgtggaggtgcataatgccaagacaaagccgcgggaggagcagtacaacagcacgtaccgtgtggtcagcgtcctcaccgtcctgcaccaggactggctgaatggcaaggagtacaagtgcaaggtctccaacaaagccctcccagcccccatcgagaaaaccatctccaaagccaaagggcagccccgagaaccacaggtgtacaccctgcccccatcccgggatgagctgaccaagaaccaggtcagcctgacctgcctggtcaaaggcttctatccaagcgacatcgccgtggagtgggagagcaatgggcagccggagaacaactacaagaccacgcctcccgtgctggactccgacggctccttcttcctctacagcaagctcaccgtggacaagagcaggtggcagcaggggaacgtcttctcatgctccgtgatgcatgaggctctgcacaaccactacacgcagaagagcctctccctgtctccgggtaaatga

SEQ ID NO: 191 - protein, 502 aa, Artificial Sequence
  source: /note="Description of Artificial Sequence: Synthetic polypeptide"
MEAPAQLLFLLLLWLPDTTGEVQLLESGGGLVQPGGSLRLSCAASGFTFSSYAMSWVRQAPGKGLEWVSAISGSGGSTYYADSVKGRFTISRDNSKNTLYLQMNSLRAEDTAVYYCARQSGADWYFDLWGRGTLVTVSSGGGGSGGGGSGGGGSAQAVLTQPSAVSGAPGQRVTISCTGTSSNIGTNYLVHWYQQRPGTAPQLLVSGNNTRPSGVTDRFSVSKSATSASLAITGLQAEDEADYYCQTYDINLRVWVFGGGTKVTVLGDVREPKSSDKTHTCPPCPAPELLGGPSVFLFPPKPKDTLMISRTPEVTCVVVDVSHEDPEVKFNWYVDGVEVHNAKTKPREEQYNSTYRVVSVLTVLHQDWLNGKEYKCKVSNKALPAPIEKTISKAKGQPREPQVYTLPPSRDELTKNQVSLTCLVKGFYPSDIAVEWESNGQPENNYKTTPPVLDSDGSFFLYSKLTVDKSRWQQGNVFSCSVMHEALHNHYTQKSLSLSPGK

SEQ ID NO: 192 - DNA, 1491 bp, Artificial Sequence
  source: /note="Description of Artificial Sequence: Synthetic polynucleotide"
atggaagcaccagcgcagcttctcttcctcctgctactctggctcccagataccaccggtgaggtgcagctggtggagactgggggaggcgtggtccagcctggggggtccctgagcctctcctgtgcagcgtctggattcaccttcagtagctatggcatgcagtgggtccgccaggctccaggcaaggggctggagtgggtggcgtttatacggtacgatggaagtagtgaatactatgcagactccgtgaagggccgattcaccatctccagagacaattccaagaacacgctgtatctgcaaatgaacagcctgagagctgaggacacggctgtgtattactgtggaagaacgctggagtctagtttgtggggcaagggaaccctggtcaccgtctcgagtggtggaggcggttcaggcggaggtggcagcggcggtggcggatcgcagtctgtgttgacgcagccgccctcagtgtctgcggccccaggacagaaggtcaccatttcctgctctggaagcacctccaacattgggaataattatgtctcctggtaccaacagcacccaggcaaagcccccaaactcatgatttatgatgtcagtaagcggccctcaggggtccctgaccgattctctggctccaagtctggcaactcagcctccctggacatcagtgggctccagtctgaggatgaggctgattattactgtgcagcatgggatgacagcctgagtgaatttctcttcggaactaggaccaagctgaccgtcctaggtgacgtacgcgagcccaaatcttctgacaaaactcacacatgcccaccgtgcccagcacctgaactcctgggtggaccgtcagtcttcctcttccccccaaaacccaaggacaccctcatgatctcccggacccctgaggtcacatgcgtggtggtggacgtgagccacgaagaccctgaggtcaagttcaactggtacgtggacggcgtggaggtgcataatgccaagacaaagccgcgggaggagcagtacaacagcacgtaccgtgtggtcagcgtcctcaccgtcctgcaccaggactggctgaatggcaaggagtacaagtgcaaggtctccaacaaagccctcccagcccccatcgagaaaaccatctccaaagccaaagggcagccccgagaaccacaggtgtacaccctgcccccatcccgggatgagctgaccaagaaccaggtcagcctgacctgcctggtcaaaggcttctatccaagcgacatcgccgtggagtgggagagcaatgggcagccggagaacaactacaagaccacgcctcccgtgctggactccgacggctccttcttcctctacagcaagctcaccgtggacaagagcaggtggcagcaggggaacgtcttctcatgctccgtgatgcatgaggctctgcacaaccactacacgcagaagagcctctccctgtctccgggtaaatga

SEQ ID NO: 193 - protein, 496 aa, Artificial Sequence
  source: /note="Description of Artificial Sequence: Synthetic polypeptide"
MEAPAQLLFLLLLWLPDTTGEVQLVETGGGVVQPGGSLSLSCAASGFTFSSYGMQWVRQAPGKGLEWVAFIRYDGSSEYYADSVKGRFTISRDNSKNTLYLQMNSLRAEDTAVYYCGRTLESSLWGKGTLVTVSSGGGGSGGGGSGGGGSQSVLTQPPSVSAAPGQKVTISCSGSTSNIGNNYVSWYQQHPGKAPKLMIYDVSKRPSGVPDRFSGSKSGNSASLDISGLQSEDEADYYCAAWDDSLSEFLFGTRTKLTVLGDVREPKSSDKTHTCPPCPAPELLGGPSVFLFPPKPKDTLMISRTPEVTCVVVDVSHEDPEVKFNWYVDGVEVHNAKTKPREEQYNSTYRVVSVLTVLHQDWLNGKEYKCKVSNKALPAPIEKTISKAKGQPREPQVYTLPPSRDELTKNQVSLTCLVKGFYPSDIAVEWESNGQPENNYKTTPPVLDSDGSFFLYSKLTVDKSRWQQGNVFSCSVMHEALHNHYTQKSLSLSPGK

SEQ ID NO: 194 - DNA, 1509 bp, Artificial Sequence
  source: /note="Description of Artificial Sequence: Synthetic polynucleotide"
atggaagcaccagcgcagcttctcttcctcctgctactctggctcccagataccaccggtcaggtgcagctggtgcagtctggagctgaggtgaagaagcctgggtcctcggtgaaggtctcctgcaaggcttctggttacacctttaccagctatggtatcagctgggtgcgacaggcccctggacaagggcttgagtggatgggatggatcagcgcttacaatggtaacacaaactatgcacagaagctccagggcagagtcaccatgaccacagacacatccacgagcacagcctacatggagctgaggagcctgagatctgacgacacggccgtgtattactgtgcgagagtcccgggcgtaagtgggagctatccagactactactacatggacgtctggggcaagggaaccctggtcaccgtctcctcaggtggaggcggttcaggcggtggcagcggcggtggcggatcggacatccagatgacccagtctccttccaccctgtctgcatctattggagacagagtcaccatcacctgccgggccagtgagggtatttatcactggttggcctggtatcagcagaagccagggaaagctcctaaactcctgatctataaggcctctagtttagccagtggggccccatcaaggttcagcggcagtggatctgggacagatttcactctcaccatcagcagcctgcagcctgatgattttgcaacttattactgccaacaatatagtaattatccgctcactttcggcggagggaccaagctggagatcaaacgtgacgtacgcgagcccaaatcttctgacaaaactcacacatgcccaccgtgcccagcacctgaactcctgggtggaccgtcagtcttcctcttccccccaaaacccaaggacaccctcatgatctcccggacccctgaggtcacatgcgtggtggtggacgtgagccacgaagaccctgaggtcaagttcaactggtacgtggacggcgtggaggtgcataatgccaagacaaagccgcgggaggagcagtacaacagcacgtaccgtgtggtcagcgtcctcaccgtcctgcaccaggactggctgaatggcaaggagtacaagtgcaaggtctccaacaaagccctcccagcccccatcgagaaaaccatctccaaagccaaagggcagccccgagaaccacaggtgtacaccctgcccccatcccgggatgagctgaccaagaaccaggtcagcctgacctgcctggtcaaaggcttctatccaagcgacatcgccgtggagtgggagagcaatgggcagccggagaacaactacaagaccacgcctcccgtgctggactccgacggctccttcttcctctacagcaagctcaccgtggacaagagcaggtggcagcaggggaacgtcttctcatgctccgtgatgcatgaggctctgcacaaccactacacgcagaagagcctctccctgtctccgggtaaatga

SEQ ID NO: 195 - protein, 502 aa, Artificial Sequence
  source: /note="Description of Artificial Sequence: Synthetic polypeptide"
MEAPAQLLFLLLLWLPDTTGQVQLVQSGAEVKKPGSSVKVSCKASGYTFTSYGISWVRQAPGQGLEWMGWISAYNGNTNYAQKLQGRVTMTTDTSTSTAYMELRSLRSDDTAVYYCARVPGVSGSYPDYYYMDVWGKGTLVTVSSGGGGSGGGSGGGGSDIQMTQSPSTLSASIGDRVTITCRASEGIYHWLAWYQQKPGKAPKLLIYKASSLASGAPSRFSGSGSGTDFTLTISSLQPDDFATYYCQQYSNYPLTFGGGTKLEIKRDVREPKSSDKTHTCPPCPAPELLGGPSVFLFPPKPKDTLMISRTPEVTCVVVDVSHEDPEVKFNWYVDGVEVHNAKTKPREEQYNSTYRVVSVLTVLHQDWLNGKEYKCKVSNKALPAPIEKTISKAKGQPREPQVYTLPPSRDELTKNQVSLTCLVKGFYPSDIAVEWESNGQPENNYKTTPPVLDSDGSFFLYSKLTVDKSRWQQGNVFSCSVMHEALHNHYTQKSLSLSPGK

SEQ ID NO: 196 - DNA, 1509 bp, Artificial Sequence
  source: /note="Description of Artificial Sequence: Synthetic polynucleotide"
atggaagcaccagcgcagcttctcttcctcctgctactctggctcccagataccaccggtgaggtgcagctgttggagtctgggggaggcttggtacagcctggggggtccctgagactctcctgtgcagcctctggattcacctttagcagctatgccatgagctgggtccgccaggctccagggaaggggctggagtgggtctcagctattagtggtagtggtggtagcacatactacgcagactccgtgaagggccggttcaccatctccagagacaattccaagaacacgctgtatctgcaaatgaacagcctgagagccgaggacacggccgtgtattactgtgcgagatggaggcctcttctagactaccactttgaccaatggggccaagggacaatggtcaccgtctcgagtggaggcggcggttcaggcggaggtggctctggcggtggcggaagtgcacagtctgtgctgactcagccaccctcagcgtctgggacccccggacagacggtaacaatctcttgttctggaagcagctccaacatcggaagtagtgttgttaattggtaccagcagttcccaggaacggcccccaaagtcctcgtctatagtaacactcagcggccctcaggggtccctgaccgattctctggctccaggtctggcacctcagcctccctggccatcagtgggctccagtctgaggatgaggctgattattactgtttagcatgggatgccagcctgaatggttgggtgttcggcggagggaccaagctgaccgtcctaggtgacgtacgcgagcccaaatcttctgacaaaactcacacatgcccaccgtgcccagcacctgaactcctgggtggaccgtcagtcttcctcttccccccaaaacccaaggacaccctcatgatctcccggacccctgaggtcacatgcgtggtggtggacgtgagccacgaagaccctgaggtcaagttcaactggtacgtggacggcgtggaggtgcataatgccaagacaaagccgcgggaggagcagtacaacagcacgtaccgtgtggtcagcgtcctcaccgtcctgcaccaggactggctgaatggcaaggagtacaagtgcaaggtctccaacaaagccctcccagcccccatcgagaaaaccatctccaaagccaaagggcagccccgagaaccacaggtgtacaccctgcccccatcccgggatgagctgaccaagaaccaggtcagcctgacctgcctggtcaaaggcttctatccaagcgacatcgccgtggagtgggagagcaatgggcagccggagaacaactacaagaccacgcctcccgtgctggactccgacggctccttcttcctctacagcaagctcaccgtggacaagagcaggtggcagcaggggaacgtcttctcatgctccgtgatgcatgaggctctgcacaaccactacacgcagaagagcctctccctgtctccgggtaaatga

SEQ ID NO: 197 - protein, 502 aa, Artificial Sequence
  source: /note="Description of Artificial Sequence: Synthetic polypeptide"
MEAPAQLLFLLLLWLPDTTGEVQLLESGGGLVQPGGSLRLSCAASGFTFSSYAMSWVRQAPGKGLEWVSAISGSGGSTYYADSVKGRFTISRDNSKNTLYLQMNSLRAEDTAVYYCARWRPLLDYHFDQWGQGTMVTVSSGGGGSGGGGSGGGGSAQSVLTQPPSASGTPGQTVTISCSGSSSNIGSSVVNWYQQFPGTAPKVLVYSNTQRPSGVPDRFSGSRSGTSASLAISGLQSEDEADYYCLAWDASLNGWVFGGGTKLTVLGDVREPKSSDKTHTCPPCPAPELLGGPSVFLFPPKPKDTLMISRTPEVTCVVVDVSHEDPEVKFNWYVDGVEVHNAKTKPREEQYNSTYRVVSVLTVLHQDWLNGKEYKCKVSNKALPAPIEKTISKAKGQPREPQVYTLPPSRDELTKNQVSLTCLVKGFYPSDIAVEWESNGQPENNYKTTPPVLDSDGSFFLYSKLTVDKSRWQQGNVFSCSVMHEALHNHYTQKSLSLSPGK

SEQ ID NO: 198 - DNA, 1509 bp, Artificial Sequence
  source: /note="Description of Artificial Sequence: Synthetic polynucleotide"
atggaagcaccagcgcagcttctcttcctcctgctactctggctcccagataccaccggtgaggtgcagctggtggagactgggggaggcttggtacagcctggggggtccctgagactctcctgtgcagcctctggattcaccttcagtagctatggcatgaactgggtccgccaggctccagggaaggggctggagtgggtttcatacattagtagttctggtaataccatattctacgcagactctgtgaagggccgattcaccatctccagagacagtgccaagaattcagtgtctctgcagatgaacagcctgagagacgaggacacggctgtgtattactgtgcttcctactactcctactactacggtatggacgcctggggccaggggacaatggtcaccgtctcgagtggaggcggcggttcaggcggaggtggctctggcggtggcggaagtgcactttcctatgtgctgactcagccaccctcagcgtctgggacccccgggcagagggtcaccatctcttgttctggaagcagctccaacatcggaagtaatactgtaaactggtaccagcagctcccaggaacggcccccaaactcctcatctatagtaataatcagcggccctcaggggtccctgaccgattctctggctccaagtctggcacctcagcctccctggccatcagtgggctgcggtccgaggatgaggctgattattactgtgcagcatgggattacagcctgagtggttgggtgttcggcggagggaccaaggtcaccgtcctaggtgacgtacgcgagcccaaatcttctgacaaaactcacacatgcccaccgtgcccagcacctgaactcctgggtggaccgtcagtcttcctcttccccccaaaacccaaggacaccctcatgatctcccggacccctgaggtcacatgcgtggtggtggacgtgagccacgaagaccctgaggtcaagttcaactggtacgtggacggcgtggaggtgcataatgccaagacaaagccgcgggaggagcagtacaacagcacgtaccgtgtggtcagcgtcctcaccgtcctgcaccaggactggctgaatggcaaggagtacaagtgcaaggtctccaacaaagccctcccagcccccatcgagaaaaccatctccaaagccaaagggcagccccgagaaccacaggtgtacaccctgcccccatcccgggatgagctgaccaagaaccaggtcagcctgacctgcctggtcaaaggcttctatccaagcgacatcgccgtggagtgggagagcaatgggcagccggagaacaactacaagaccacgcctcccgtgctggactccgacggctccttcttcctctacagcaagctcaccgtggacaagagcaggtggcagcaggggaacgtcttctcatgctccgtgatgcatgaggctctgcacaaccactacacgcagaagagcctctccctgtctccgggtaaatga

SEQ ID NO: 199 - protein, 502 aa, Artificial Sequence
  source: /note="Description of Artificial Sequence: Synthetic polypeptide"
MEAPAQLLFLLLLWLPDTTGEVQLVETGGGLVQPGGSLRLSCAASGFTFSSYGMNWVRQAPGKGLEWVSYISSSGNTIFYADSVKGRFTISRDSAKNSVSLQMNSLRDEDTAVYYCASYYSYYYGMDAWGQGTMVTVSSGGGGSGGGGSGGGGSALSYVLTQPPSASGTPGQRVTISCSGSSSNIGSNTVNWYQQLPGTAPKLLIYSNNQRPSGVPDRFSGSKSGTSASLAISGLRSEDEADYYCAAWDYSLSGWVFGGGTKVTVLGDVREPKSSDKTHTCPPCPAPELLGGPSVFLFPPKPKDTLMISRTPEVTCVVVDVSHEDPEVKFNWYVDGVEVHNAKTKPREEQYNSTYRVVSVLTVLHQDWLNGKEYKCKVSNKALPAPIEKTISKAKGQPREPQVYTLPPSRDELTKNQVSLTCLVKGFYPSDIAVEWESNGQPENNYKTTPPVLDSDGSFFLYSKLTVDKSRWQQGNVFSCSVMHEALHNHYTQKSLSLSPGK

SEQ ID NO: 200 - DNA, 1497 bp, Artificial Sequence
  source: /note="Description of Artificial Sequence: Synthetic polynucleotide"
atggaagcaccagcgcagcttctcttcctcctgctactctggctcccagataccaccggtgaggtgcagctggtggagactggggaaggcctggtcaagcctggggggtccctgagactctcctgtacagcctctggattcaccttcaggagttatagcttgaactgggtccgccaggctccagggcaggggctggagtgggtctcatccattagtagtactagtacttacatatactacgcagactcggtgaagggccgattcaccatctccagagacgacgccaagaacacactgtatctgcaaatgaacagcctgagagccgaagacacagctgcatattactgtgttagactgggatctggtgggggatattttcctgactactggggcaggggcaccctggtcaccgtctcgagtggtggaggcggttcaggcggaggtggcagcggcggtggcggatcgtctgagctgactcaggaccctgctgtgtctgtggccttgggacagacagtcaggatcacatgccaaggagacagcctcagaagctattatgcaagctggtaccagcagaagccaggacaggcccctgtacttgtcatctatggtaaaaacaaccggccctcagggatcccagaccgattctctggctccagctcaggaaacacagcttccttgaccatcactggggctcaggcggaagatgaggctgactattactgtaactcccgggacagcagtggtaaccatgtggtattcggcggagggaccaagctgaccgtcctaggtgacgtacgcgagcccaaatcttctgacaaaactcacacatgcccaccgtgcccagcacctgaactcctgggtggaccgtcagtcttcctcttccccccaaaacccaaggacaccctcatgatctcccggacccctgaggtcacatgcgtggtggtggacgtgagccacgaagaccctgaggtcaagttcaactggtacgtggacggcgtggaggtgcataatgccaagacaaagccgcgggaggagcagtacaacagcacgtaccgtgtggtcagcgtcctcaccgtcctgcaccaggactggctgaatggcaaggagtacaagtgcaaggtctccaacaaagccctcccagcccccatcgagaaaaccatctccaaagccaaagggcagccccgagaaccacaggtgtacaccctgcccccatcccgggatgagctgaccaagaaccaggtcagcctgacctgcctggtcaaaggcttctatccaagcgacatcgccgtggagtgggagagcaatgggcagccggagaacaactacaagaccacgcctcccgtgctggactccgacggctccttcttcctctacagcaagctcaccgtggacaagagcaggtggcagcaggggaacgtcttctcatgctccgtgatgcatgaggctctgcacaaccactacacgcagaagagcctctccctgtctccgggtaaatga

SEQ ID NO: 201 - protein, 498 aa, Artificial Sequence [sequence omitted]

SEQ ID NO: 202 - DNA, 1509 bp, Artificial Sequence
  source: /note="Description of Artificial Sequence: Synthetic polynucleotide"
atggaagcaccagcgcagcttctcttcctcctgctactctggctcccagataccaccggtcaggtgcagctggtggagtctggggctgaggtgaagaagcctggggcctcagtgaaggtctcctgcaaggcttctggatacaccttcaccagttatgatatcaactgggtgcgacaggcccccggacaaaggcttgagtggatgggatggatcaacgctggcaatggtaacacaaaatattcacagaagttccagggcagagtcaccattaccagggacacatccgcgagcacagcctacatggagctgaggagcctgagatctgacgacacggccgtgtattactgtgcgagagggaggagctatggccacccgtactactttgactactggggccagggaaccctggtcaccgtctcgagtggtggaggcggttcaggcggaggtggcagcggcggtggcggatcgcagtctgtgctgactcagcctgcctccgtgtctgggtctcctggacagtcgatcaccatctcctgcactggaaccagcagtgacgttggtggttataactatgtctcctggtaccaacaacacccaggcaaagcccccaaactcatgatttatgagggcagtaagcggccctcaggggtttctaatcgcttctctggctccaagtctggcaacacggcctccctgacaatctctgggctccaggctgaggacgaggctgattattactgcagctcatatacaaccaggagcactcgagttttcggcggagggaccaagctgaccgtcctaggtgacgtacgcgagcccaaatcttctgacaaaactcacacatgcccaccgtgcccagcacctgaactcctgggtggaccgtcagtcttcctcttccccccaaaacccaaggacaccctcatgatctcccggacccctgaggtcacatgcgtggtggtggacgtgagccacgaagaccctgaggtcaagttcaactggtacgtggacggcgtggaggtgcataatgccaagacaaagccgcgggaggagcagtacaacagcacgtaccgtgtggtcagcgtcctcaccgtcctgcaccaggactggctgaatggcaaggagtacaagtgcaaggtctccaacaaagccctcccagcccccatcgagaaaaccatctccaaagccaaagggcagccccgagaaccacaggtgtacaccctgcccccatcccgggatgagctgaccaagaaccaggtcagcctgacctgcctggtcaaaggcttctatccaagcgacatcgccgtggagtgggagagcaatgggcagccggagaacaactacaagaccacgcctcccgtgctggactccgacggctccttcttcctctacagcaagctcaccgtggacaagagcaggtggcagcaggggaacgtcttctcatgctccgtgatgcatgaggctctgcacaaccactacacgcagaagagcctctccctgtctccgggtaaatga

SEQ ID NO: 203 - protein, 502 aa, Artificial Sequence
  source: /note="Description of Artificial Sequence: Synthetic polypeptide"
MEAPAQLLFLLLLWLPDTTGQVQLVESGAEVKKPGASVKVSCKASGYTFTSYDINWVRQAPGQRLEWMGWINAGNGNTKYSQKFQGRVTITRDTSASTAYMELRSLRSDDTAVYYCARGRSYGHPYYFDYWGQGTLVTVSSGGGGSGGGGSGGGGSQSVLTQPASVSGSPGQSITISCTGTSSDVGGYNYVSWYQQHPGKAPKLMIYEGSKRPSGVSNRFSGSKSGNTASLTISGLQAEDEADYYCSSYTTRSTRVFGGGTKLTVLGDVREPKSSDKTHTCPPCPAPELLGGPSVFLFPPKPKDTLMISRTPEVTCVVVDVSHEDPEVKFNWYVDGVEVHNAKTKPREEQYNSTYRVVSVLTVLHQDWLNGKEYKCKVSNKALPAPIEKTISKAKGQPREPQVYTLPPSRDELTKNQVSLTCLVKGFYPSDIAVEWESNGQPENNYKTTPPVLDSDGSFFLYSKLTVDKSRWQQGNVFSCSVMHEALHNHYTQKSLSLSPGK

SEQ ID NO: 204 - DNA, 1518 bp, Artificial Sequence
  source: /note="Description of Artificial Sequence: Synthetic polynucleotide"
atggaagcaccagcgcagcttctcttcctcctgctactctggctcccagataccaccggtaaggtgcagctggtgcagtctgggacagaggtgaaaaagcccggggagtctctgaagatctcctgtcagggttctggatacaggtttagtagtgactggattgcctgggtgcgccagatgcccgggaaaggcctggagtggatggggattgtctatcctggtgactctgataccagatatagcccgtccttccaaggccaagtcaccatctcagccgacaagtccatcagtactgcctacctgcagtggagcggcctgaaggcctcggacaccgccaagtattactgtgcgagagtgcaacaggcagtgggagctaaaggttatgctatggacgtctggggcaagggaaccctggtcaccgtctcgagtggaggcggcggttcaggcggaggtggctctggcggtggcggaagtgcacagactgtggtgatccaggagccatcgttctcagtgtcccctggagggacagtcacactcacttgtggcttgagctctggctcagtctctaccagttactaccccagctggtaccggcagaccccaggccaggctccacacacactcattcacaacacaaagattcgctcctctggggtccctgatcgcttctctggctccatccttgggaacaatgctgccctcaccatcacgggggcccaggcagatgatgaatctgattattactgtcttttgtatatgggtagcggcatttacgtgttcggcggagggaccaagctgaccgtcctaggtgacgtacgcgagcccaaatcttctgacaaaactcacacatgcccaccgtgcccagcacctgaactcctgggtggaccgtcagtcttcctcttccccccaaaacccaaggacaccctcatgatctcccggacccctgaggtcacatgcgtggtggtggacgtgagccacgaagaccctgaggtcaagttcaactggtacgtggacggcgtggaggtgcataatgccaagacaaagccgcgggaggagcagtacaacagcacgtaccgtgtggtcagcgtcctcaccgtcctgcaccaggactggctgaatggcaaggagtacaagtgcaaggtctccaacaaagccctcccagcccccatcgagaaaaccatctccaaagccaaagggcagccccgagaaccacaggtgtacaccctgcccccatcccgggatgagctgaccaagaaccaggtcagcctgacctgcctggtcaaaggcttctatccaagcgacatcgccgtggagtgggagagcaatgggcagccggagaacaactacaagaccacgcctcccgtgctggactccgacggctccttcttcctctacagcaagctcaccgtggacaagagcaggtggcagcaggggaacgtcttctcatgctccgtgatgcatgaggctctgcacaaccactacacgcagaagagcctctccctgtctccgggtaaatga

SEQ ID NO: 205 - protein, 505 aa, Artificial Sequence
  source: /note="Description of Artificial Sequence: Synthetic polypeptide"
MEAPAQLLFLLLLWLPDTTGKVQLVQSGTEVKKPGESLKISCQGSGYRFSSDWIAWVRQMPGKGLEWMGIVYPGDSDTRYSPSFQGQVTISADKSISTAYLQWSGLKASDTAKYYCARVQQAVGAKGYAMDVWGKGTLVTVSSGGGGSGGGGSGGGGSAQTVVIQEPSFSVSPGGTVTLTCGLSSGSVSTSYYPSWYRQTPGQAPHTLIHNTKIRSSGVPDRFSGSILGNNAALTITGAQADDESDYYCLLYMGSGIYVFGGGTKLTVLGDVREPKSSDKTHTCPPCPAPELLGGPSVFLFPPKPKDTLMISRTPEVTCVVVDVSHEDPEVKFNWYVDGVEVHNAKTKPREEQYNSTYRVVSVLTVLHQDWLNGKEYKCKVSNKALPAPIEKTISKAKGQPREPQVYTLPPSRDELTKNQVSLTCLVKGFYPSDIAVEWESNGQPENNYKTTPPVLDSDGSFFLYSKLTVDKSRWQQGNVFSCSVMHEALHNHYTQKSLSLSPGK

SEQ ID NO: 206 - DNA, 1518 bp, Artificial Sequence
  source: /note="Description of Artificial Sequence: Synthetic polynucleotide"
atggaagcaccagcgcagcttctcttcctcctgctactctggctcccagataccaccggtgaagtgcagctggtgcagtctggggctgaggtgaagaagcctggggcctcagtgagggtctcctgcaagggttctggaaacaccttcaccggccactacatccactgggtgcgacaggcccctggacaaggacttgagtggctgggatggatcgaccctaacactggtgacatacagtattcagaaaactttaagggctcggtcaccttgaccagggacccatccatcaactcagtcttcatggacctgatcaggctgacatctgacgacacggccatgtattactgtgcgagagaaggtgccgggctcgccaactactattactacggtctggacgtctggggccgagggacaatggtcaccgtctcgagtggaggcggcggttcaggcggaggtggctctggcggtggcggaagtgcacagactgtggtgctccaggagccttcgttctcagtgtcccctggggggacagtcacactcacttgtggcttgaactttggctcagtctctactgcttactaccccagttggtaccagcagaccccaggccaagctccacgcacgctcatctacggcacaaatattcgttcctctggggtcccggatcgcttctctggctccatcgtagggaacaaagctgccctcaccatcacgggggcccagacagaagatgagtctgattattattgtgcgctgtatatgggtagtggcatgctcttcggcggcgggaccaaggtcaccgtcctaggtgacgtacgcgagcccaaatcttctgacaaaactcacacatgcccaccgtgcccagcacctgaactcctgggtggaccgtcagtcttcctcttccccccaaaacccaaggacaccctcatgatctcccggacccctgaggtcacatgcgtggtggtggacgtgagccacgaagaccctgaggtcaagttcaactggtacgtggacggcgtggaggtgcataatgccaagacaaagccgcgggaggagcagtacaacagcacgtaccgtgtggtcagcgtcctcaccgtcctgcaccaggactggctgaatggcaaggagtacaagtgcaaggtctccaacaaagccctcccagcccccatcgagaaaaccatctccaaagccaaagggcagccccgagaaccacaggtgtacaccctgcccccatcccgggatgagctgaccaagaaccaggtcagcctgacctgcctggtcaaaggcttctatccaagcgacatcgccgtggagtgggagagcaatgggcagccggagaacaactacaagaccacgcctcccgtgctggactccgacggctccttcttcctctacagcaagctcaccgtggacaagagcaggtggcagcaggggaacgtcttctcatgctccgtgatgcatgaggctctgcacaaccactacacgcagaagagcctctccctgtctccgggtaaatga

SEQ ID NO: 207 - protein, 505 aa, Artificial Sequence
  source: /note="Description of Artificial Sequence: Synthetic polypeptide"
MEAPAQLLFLLLLWLPDTTGEVQLVQSGAEVKKPGASVRVSCKGSGNTFTGHYIHWVRQAPGQGLEWLGWIDPNTGDIQYSENFKGSVTLTRDPSINSVFMDLIRLTSDDTAMYYCAREGAGLANYYYYGLDVWGRGTMVTVSSGGGGSGGGGSGGGGSAQTVVLQEPSFSVSPGGTVTLTCGLNFGSVSTAYYPSWYQQTPGQAPRTLIYGTNIRSSGVPDRFSGSIVGNKAALTITGAQTEDESDYYCALYMGSGMLFGGGTKVTVLGDVREPKSSDKTHTCPPCPAPELLGGPSVFLFPPKPKDTLMISRTPEVTCVVVDVSHEDPEVKFNWYVDGVEVHNAKTKPREEQYNSTYRVVSVLTVLHQDWLNGKEYKCKVSNKALPAPIEKTISKAKGQPREPQVYTLPPSRDELTKNQVSLTCLVKGFYPSDIAVEWESNGQPENNYKTTPPVLDSDGSFFLYSKLTVDKSRWQQGNVFSCSVMHEALHNHYTQKSLSLSPGK

SEQ ID NO: 208 - DNA, 1503 bp, Artificial Sequence
  source: /note="Description of Artificial Sequence: Synthetic polynucleotide"
atggaagcaccagcgcagcttctcttcctcctgctactctggctcccagataccaccggtgaagtgcagctggtgcagtctggggctgaagtgaagaagcctggggcctcagtgaaggtctcttgtcaggcttctggatacaccttcagcgggcactatatgcacttggtgcgacaggcccctggacaagggcttgagtggatggggtggatccaccctaccagtggtggcacaacctatgcacagaagtttcagggccgggtcgttatgaccagggacacgtccatcagcacagcctacatggaactgagtaggctgacatctgacgacacggccgtgtattactgtgcaagaatgtcccaaaactatgatgcttttgatatctggggccaagggacaatggtcaccgtctcgagtggaggcggcggttcaggcggaggtggctctggcggtggcggaagtgcacaggctgtgctgactcagccgtcctcagtgtctggggccccagggcagagggtcaccatctcctgcactgggagcagctccaacatcggggcaggttatgatgtaaactggtaccaacaatttccaggaacagcccccaaaattatcgtctatggcgatcggccctcaggggcccctgaccgattctctggctccaagtctggcacctcagcctccctggcaatcactggactccgggctgaggatgaggctgattattactgccagtcctgggacagtcgcctgagtagttatgtcttcggaactgggaccaaggtcaccgtcctaggtgacgtacgcgagcccaaatcttctgacaaaactcacacatgcccaccgtgcccagcacctgaactcctgggtggaccgtcagtcttcctcttccccccaaaacccaaggacaccctcatgatctcccggacccctgaggtcacatgcgtggtggtggacgtgagccacgaagaccctgaggtcaagttcaactggtacgtggacggcgtggaggtgcataatgccaagacaaagccgcgggaggagcagtacaacagcacgtaccgtgtggtcagcgtcctcaccgtcctgcaccaggactggctgaatggcaaggagtacaagtgcaaggtctccaacaaagccctcccagcccccatcgagaaaaccatctccaaagccaaagggcagccccgagaaccacaggtgtacaccctgcccccatcccgggatgagctgaccaagaaccaggtcagcctgacctgcctggtcaaaggcttctatccaagcgacatcgccgtggagtgggagagcaatgggcagccggagaacaactacaagaccacgcctcccgtgctggactccgacggctccttcttcctctacagcaagctcaccgtggacaagagcaggtggcagcaggggaacgtcttctcatgctccgtgatgcatgaggctctgcacaaccactacacgcagaagagcctctccctgtctccgggtaaatga

SEQ ID NO: 209 - protein, 500 aa, Artificial Sequence
  source: /note="Description of Artificial Sequence: Synthetic polypeptide"
MEAPAQLLFLLLLWLPDTTGEVQLVQSGAEVKKPGASVKVSCQASGYTFSGHYMHLVRQAPGQGLEWMGWIHPTSGGTTYAQKFQGRVVMTRDTSISTAYMELSRLTSDDTAVYYCARMSQNYDAFDIWGQGTMVTVSSGGGGSGGGGSGGGGSAQAVLTQPSSVSGAPGQRVTISCTGSSSNIGAGYDVNWYQQFPGTAPKIIVYGDRPSGAPDRFSGSKSGTSASLAITGLRAEDEADYYCQSWDSRLSSYVFGTGTKVTVLGDVREPKSSDKTHTCPPCPAPELLGGPSVFLFPPKPKDTLMISRTPEVTCVVVDVSHEDPEVKFNWYVDGVEVHNAKTKPREEQYNSTYRVVSVLTVLHQDWLNGKEYKCKVSNKALPAPIEKTISKAKGQPREPQVYTLPPSRDELTKNQVSLTCLVKGFYPSDIAVEWESNGQPENNYKTTPPVLDSDGSFFLYSKLTVDKSRWQQGNVFSCSVMHEALHNHYTQKSLSLSPGK

SEQ ID NO: 210 - DNA, 1533 bp, Artificial Sequence
  source: /note="Description of Artificial Sequence: Synthetic polynucleotide"
atggaagcaccagcgcagcttctcttcctcctgctactctggctcccagataccaccggtgaggtgcagctggtgcagtctggggcagaggtgaaaaagcccggagagtctctgaagatctcctgtaagggctctggatacacctttaccaaccactggatcgcctgggtgcgccagatgcccgggaaaggcctggagtggatgggcatcatctatcctggtgactctgaaacgaggtacagcccgtccttccaaggccacgtcaccatctcagccgacaagtccatcagtaccgcctatttgcagtggagcaccctgaaggactcggactccgccatgtacttctgtgtgagacaggcccgtggctgggacgacggacgggctggatattattattccggtatggacgcctggggccagggaaccctggtcaccgtctcgagtggaggcggcggttcaggcggaggtggctctggcggtggcggaagtgcacaggctgtggtgctccaggagccatcgttctcagtgtcccctggagggacagtcacactcacctgtggcttgcgctctgggtcagtctctactagtcactaccccagctggtaccagcagaccccaggccaggctccacgcacgctcatttacagcacaaacactcgctcttctggggtccctgatcgcttctctggctccatccttgggaacaaagctgccctcaccatcacgggggcccaggcagatgatgaatctaattattactgtatgctatacatgggcagtggcatgtatgtgttcggcggagggaccaaggtcaccgtcctaggtgacgtacgcgagcccaaatcttctgacaaaactcacacatgcccaccgtgcccagcacctgaactcctgggtggaccgtcagtcttcctcttccccccaaaacccaaggacaccctcatgatctcccggacccctgaggtcacatgcgtggtggtggacgtgagccacgaagaccctgaggtcaagttcaactggtacgtggacggcgtggaggtgcataatgccaagacaaagccgcgggaggagcagtacaacagcacgtaccgtgtggtcagcgtcctcaccgtcctgcaccaggactggctgaatggcaaggagtacaagtgcaaggtctccaacaaagccctcccagcccccatcgagaaaaccatctccaaagccaaagggcagccccgagaaccacaggtgtacaccctgcccccatcccgggatgagctgaccaagaaccaggtcagcctgacctgcctggtcaaaggcttctatccaagcgacatcgccgtggagtgggagagcaatgggcagccggagaacaactacaagaccacgcctcccgtgctggactccgacggctccttcttcctctacagcaagctcaccgtggacaagagcaggtggcagcaggggaacgtcttctcatgctccgtgatgcatgaggctctgcacaaccactacacgcagaagagcctctccctgtctccgggtaaatga

SEQ ID NO: 211 - protein, 510 aa, Artificial Sequence
  source: /note="Description of Artificial Sequence: Synthetic polypeptide"
MEAPAQLLFLLLLWLPDTTGEVQLVQSGAEVKKPGESLKISCKGSGYTFTNHWIAWVRQMPGKGLEWMGIIYPGDSETRYSPSFQGHVTISADKSISTAYLQWSTLKDSDSAMYFCVRQARGWDDGRAGYYYSGMDAWGQGTLVTVSSGGGGSGGGGSGGGGSAQAVVLQEPSFSVSPGGTVTLTCGLRSGSVSTSHYPSWYQQTPGQAPRTLIYSTNTRSSGVPDRFSGSILGNKAALTITGAQADDESNYYCMLYMGSGMYVFGGGTKVTVLGDVREPKSSDKTHTCPPCPAPELLGGPSVFLFPPKPKDTLMISRTPEVTCVVVDVSHEDPEVKFNWYVDGVEVHNAKTKPREEQYNSTYRVVSVLTVLHQDWLNGKEYKCKVSNKALPAPIEKTISKAKGQPREPQVYTLPPSRDELTKNQVSLTCLVKGFYPSDIAVEWESNGQPENNYKTTPPVLDSDGSFFLYSKLTVDKSRWQQGNVFSCSVMHEALHNHYTQKSLSLSPGK

SEQ ID NO: 212 - DNA, 1527 bp, Artificial Sequence
  source: /note="Description of Artificial Sequence: Synthetic polynucleotide"
atggaagcaccagcgcagcttctcttcctcctgctactctggctcccagataccaccggtgaggtgcagctgttggagtctgggggaggcttggtacagcctggggggtccctgagactctcctgtgcagcctctggattcacctttagcagctatgccatgagctgggtccgccaggctccagggaaggggctggagtgggtctcagctattagtggtagtggtggtagcacatactacgcagactccgtgaagggccggttcaccatctccagagacaattccaagaacacgctgtatctgcaaatgaacagcctgagagccgaggacacggccgtgtattactgtgcgagagatctgggaatagaccccctttggagtggttattacacaccccttgactattggggccgagggacaatggtcaccgtctcgagtggaggcggcggttcaggcggaggtggctctggcggtggcggaagtgcacacgttatactgactcaaccgccctcagcgtctgggacccccgggcagagggtcaccatctcttgttctggaagcagctccaacatcggaagtaattccgttagctggtaccagcagctcccaggaacggcccccaaactcctcatgtatactaacaatcagcggccctcaggggtccctgaccgattctctggctccaagtctggcacctcagcctccctggccatcagtgggctccagtctgaggatgaggctgattattactgtgcgacatgggatgccagcctgaatacttgggtgttcggcggagggaccaaggtcaccgtcctaggtgacgtacgcgagcccaaatcttctgacaaaactcacacatgcccaccgtgcccagcacctgaactcctgggtggaccgtcagtcttcctcttccccccaaaacccaaggacaccctcatgatctcccggacccctgaggtcacatgcgtggtggtggacgtgagccacgaagaccctgaggtcaagttcaactggtacgtggacggcgtggaggtgcataatgccaagacaaagccgcgggaggagcagtacaacagcacgtaccgtgtggtcagcgtcctcaccgtcctgcaccaggactggctgaatggcaaggagtacaagtgcaaggtctccaacaaagccctcccagcccccatcgagaaaaccatctccaaagccaaagggcagccccgagaaccacaggtgtacaccctgcccccatcccgggatgagctgaccaagaaccaggtcagcctgacctgcctggtcaaaggcttctatccaagcgacatcgccgtggagtgggagagcaatgggcagccggagaacaactacaagaccacgcctcccgtgctggactccgacggctccttcttcctctacagcaagctcaccgtggacaagagcaggtggcagcaggggaacgtcttctcatgctccgtgatgcatgaggctctgcacaaccactacacgcagaagagcctctccctgtctccgggtaaatga

SEQ ID NO: 213 - protein, 508 aa, Artificial Sequence
  source: /note="Description of Artificial Sequence: Synthetic polypeptide"
MEAPAQLLFLLLLWLPDTTGEVQLLESGGGLVQPGGSLRLSCAASGFTFSSYAMSWVRQAPGKGLEWVSAISGSGGSTYYADSVKGRFTISRDNSKNTLYLQMNSLRAEDTAVYYCARDLGIDPLWSGYYTPLDYWGRGTMVTVSSGGGGSGGGGSGGGGSAHVILTQPPSASGTPGQRVTISCSGSSSNIGSNSVSWYQQLPGTAPKLLMYTNNQRPSGVPDRFSGSKSGTSASLAISGLQSEDEADYYCATWDASLNTWVFGGGTKVTVLGDVREPKSSDKTHTCPPCPAPELLGGPSVFLFPPKPKDTLMISRTPEVTCVVVDVSHEDPEVKFNWYVDGVEVHNAKTKPREEQYNSTYRVVSVLTVLHQDWLNGKEYKCKVSNKALPAPIEKTISKAKGQPREPQVYTLPPSRDELTKNQVSLTCLVKGFYPSDIAVEWESNGQPENNYKTTPPVLDSDGSFFLYSKLTVDKSRWQQGNVFSCSVMHEALHNHYTQKSLSLSPGK

SEQ ID NO: 214 - DNA, 1506 bp, Artificial Sequence
  source: /note="Description of Artificial Sequence: Synthetic polynucleotide"
atggaagcaccagcgcagcttctcttcctcctgctactctggctcccagataccaccggtgaggtccagctggtgcagtctggagctgaggtgaaggagcctggggcctcagtgaaggtctcctgcaaggcctctggttacgacttttccaactatggtttcagctgggtgcgccaggcccctggacaaggtcttgagtggatgggatggatcagctcttataatggttacacaaactatgcacagagactccagggcagagtcaccatgaccacagacacatccacgagcacagcctacatggagctgaggagcctgagatctgacgacacagctgtctattactgtgcgagagatcgaggacttggaaactggtacttcgatctctggggccaaggcaccctggtcaccgtctcgagtggtggaggcggttcaggcggaggtggcagcggcggtggcggatcgcagtctgtgctgactcagcctgcctccgtgtctgggtctcctggacagtcgatcaccatctcctgcactggaaccagcagtgacgttggtggttataactatgtctcctggtaccaacaacacccaggcaaagcccccaaactcatgatttatgagggcagtaagcggccctcaggggtttctaatcgcttctctggctccaagtctggcaacacggcctccctgacaatctctgggctccaggctgaggacgaggctgattattactgcagctcatatacaaccaggagcactcgagttttcggcggagggaccaagctgaccgtcctaggtgacgtacgcgagcccaaatcttctgacaaaactcacacatgcccaccgtgcccagcacctgaactcctgggtggaccgtcagtcttcctcttccccccaaaacccaaggacaccctcatgatctcccggacccctgaggtcacatgcgtggtggtggacgtgagccacgaagaccctgaggtcaagttcaactggtacgtggacggcgtggaggtgcataatgccaagacaaagccgcgggaggagcagtacaacagcacgtaccgtgtggtcagcgtcctcaccgtcctgcaccaggactggctgaatggcaaggagtacaagtgcaaggtctccaacaaagccctcccagcccccatcgagaaaaccatctccaaagccaaagggcagccccgagaaccacaggtgtacaccctgcccccatcccgggatgagctgaccaagaaccaggtcagcctgacctgcctggtcaaaggcttctatccaagcgacatcgccgtggagtgggagagcaatgggcagccggagaacaactacaagaccacgcctcccgtgctggactccgacggctccttcttcctctacagcaagctcaccgtggacaagagcaggtggcagcaggggaacgtcttctcatgctccgtgatgcatgaggctctgcacaaccactacacgcagaagagcctctccctgtctccgggtaaatga

SEQ ID NO: 215 - protein, 501 aa, Artificial Sequence
  source: /note="Description of Artificial Sequence: Synthetic polypeptide"
MEAPAQLLFLLLLWLPDTTGEVQLVQSGAEVKEPGASVKVSCKASGYDFSNYGFSWVRQAPGQGLEWMGWISSYNGYTNYAQRLQGRVTMTTDTSTSTAYMELRSLRSDDTAVYYCARDRGLGNWYFDLWGQGTLVTVSSGGGGSGGGGSGGGGSQSVLTQPASVSGSPGQSITISCTGTSSDVGGYNYVSWYQQHPGKAPKLMIYEGSKRPSGVSNRFSGSKSGNTASLTISGLQAEDEADYYCSSYTTRSTRVFGGGTKLTVLGDVREPKSSDKTHTCPPCPAPELLGGPSVFLFPPKPKDTLMISRTPEVTCVVVDVSHEDPEVKFNWYVDGVEVHNAKTKPREEQYNSTYRVVSVLTVLHQDWLNGKEYKCKVSNKALPAPIEKTISKAKGQPREPQVYTLPPSRDELTKNQVSLTCLVKGFYPSDIAVEWESNGQPENNYKTTPPVLDSDGSFFLYSKLTVDKSRWQQGNVFSCSVMHEALHNHYTQKSLSLSPGK

SEQ ID NO: 216 - DNA, 1509 bp, Artificial Sequence
  source: /note="Description of Artificial Sequence: Synthetic polynucleotide"
atggaagcaccagcgcagcttctcttcctcctgctactctggctcccagataccaccggtcagatgcagctggtgcagtctgggggaggcgtggtccagcctgggaggtccctgagactctcctgtgcagcctctggattcaccttcagtagctatggcatgcactgggtccgccaggctccaggcaaggggctggagtgggtggcagttatatcatatgatggaagtattaaatactatgcagactccgtgaagggccgattcaccatctccagagacaattccaagaacacactgtatctacaaatgaacagcctgagagccgaggacacgggcgtttattactgttcgaaagatcgctatagcagtggctggtacagctccgatgcttttgatatttggggccgagggacaatggtcaccgtctcgagtggtggaggcggttcaggcggaggtggcagcggcggtggcggatcgtctgagctgactcaggaccctgctgtgtctgtggccttgggacagacagtcaggatcacatgccaaggagacagcctcagaagctattatgcaagctggtaccagcagaagccaggacaggcccctgtacttgtcatctatggtaaaaacaaccggccctcagggatcccagaccgattctctggctccagctcaggaaacacagcttccttgaccatcactggggctcaggcggaagatgaggctgactattactgtcattcccgggacagcagtggtaaccatgtgcttttcggcggagggaccaagctgaccgtcctaggtgacgtacgcgagcccaaatcttctgacaaaactcacacatgcccaccgtgcccagcacctgaactcctgggtggaccgtcagtcttcctcttccccccaaaacccaaggacaccctcatgatctcccggacccctgaggtcacatgcgtggtggtggacgtgagccacgaagaccctgaggtcaagttcaactggtacgtggacggcgtggaggtgcataatgccaagacaaagccgcgggaggagcagtacaacagcacgtaccgtgtggtcagcgtcctcaccgtcctgcaccaggactggctgaatggcaaggagtacaagtgcaaggtctccaacaaagccctcccagcccccatcgagaaaaccatctccaaagccaaagggcagccccgagaaccacaggtgtacaccctgcccccatcccgggatgagctgaccaagaaccaggtcagcctgacctgcctggtcaaaggcttctatccaagcgacatcgccgtggagtgggagagcaatgggcagccggagaacaactacaagaccacgcctcccgtgctggactccgacggctccttcttcctctacagcaagctcaccgtggacaagagcaggtggcagcaggggaacgtcttctcatgctccgtgatgcatgaggctctgcacaaccactacacgcagaagagcctctccctgtctccgggtaaatga

SEQ ID NO: 217 - protein, 502 aa, Artificial Sequence
  source: /note="Description of Artificial Sequence: Synthetic polypeptide"
MEAPAQLLFLLLLWLPDTTGQMQLVQSGGGVVQPGRSLRLSCAASGFTFSSYGMHWVRQAPGKGLEWVAVISYDGSIKYYADSVKGRFTISRDNSKNTLYLQMNSLRAEDTGVYYCSKDRYSSGWYSSDAFDIWGRGTMVTVSSGGGGSGGGGSGGGGSSELTQDPAVSVALGQTVRITCQGDSLRSYYASWYQQKPGQAPVLVIYGKNNRPSGIPDRFSGSSSGNTASLTITGAQAEDEADYYCHSRDSSGNHVLFGGGTKLTVLGDVREPKSSDKTHTCPPCPAPELLGGPSVFLFPPKPKDTLMISRTPEVTCVVVDVSHEDPEVKFNWYVDGVEVHNAKTKPREEQYNSTYRVVSVLTVLHQDWLNGKEYKCKVSNKALPAPIEKTISKAKGQPREPQVYTLPPSRDELTKNQVSLTCLVKGFYPSDIAVEWESNGQPENNYKTTPPVLDSDGSFFLYSKLTVDKSRWQQGNVFSCSVMHEALHNHYTQKSLSLSPGK

SEQ ID NO: 218 - DNA, 1515 bp, Artificial Sequence
  source: /note="Description of Artificial Sequence: Synthetic polynucleotide"
atggaagcaccagcgcagcttctcttcctcctgctactctggctcccagataccaccggtgaggtgcagctggtgcagtctgggggaggcgtggtccagcctgggaggtccctgagactctcctgtgcagcctctggattcaccttcagtagctatggcatgcactgggtccgccaggctccaggcaaggggctggagtgggtggcagttatatcatatgatggaagtattaaatactatgcagactccgtgaagggccgattcaccatctccagagacaattccaagaacacgctgtatctgcaaatgaacagcctgagagctgaggacacggctgtgtattactgtgcgcgaactggtgaatatagtggctacgatacgagtggttacagcaattggggccaaggcaccctggtcaccgtctcgagtggtggaggcggttcaggcggaggtggcagcggcggtggcggatcgcagtctgtgctgactcagccaccctcagcgtctgggacccccgggcagagggtcaccatctcttgttctggaagcagctccaacatcgggagtaacactgtaaactggtaccagcgactcccaggagcggccccccaactcctcatctacaataatgaccagcggccctcagggatccctgaccgattctctggctccaagtctggcacctcaggctccctggtcatcagtgggctccagtctgaagatgaggctgattactactgtgcgtcatgggatgacagtctgaatggtcgggtgttcggcggagggaccaagctgaccgtcctaggtgacgtacgcgagcccaaatcttctgacaaaactcacacatgcccaccgtgcccagcacctgaactcctgggtggaccgtcagtcttcctcttccccccaaaacccaaggacaccctcatgatctcccggacccctgaggtcacatgcgtggtggtggacgtgagccacgaagaccctgaggtcaagttcaactggtacgtggacggcgtggaggtgcataatgccaagacaaagccgcgggaggagcagtacaacagcacgtaccgtgtggtcagcgtcctcaccgtcctgcaccaggactggctgaatggcaaggagtacaagtgcaaggtctccaacaaagccctcccagcccccatcgagaaaaccatctccaaagccaaagggcagccccgagaaccacaggtgtacaccctgcccccatcccgggatgagctgaccaagaaccaggtcagcctgacctgcctggtcaaaggcttctatccaagcgacatcgccgtggagtgggagagcaatgggcagccggagaacaactacaagaccacgcctcccgtgctggactccgacggctccttcttcctctacagcaagctcaccgtggacaagagcaggtggcagcaggggaacgtcttctcatgctccgtgatgcatgaggctctgcacaaccactacacgcagaagagcctctccctgtctccgggtaaatga

SEQ ID NO: 219 - protein, 504 aa, Artificial Sequence
  source: /note="Description of Artificial Sequence: Synthetic polypeptide"
MEAPAQLLFLLLLWLPDTTGEVQLVQSGGGVVQPGRSLRLSCAASGFTFSSYGMHWVRQAPGKGLEWVAVISYDGSIKYYADSVKGRFTISRDNSKNTLYLQMNSLRAEDTAVYYCARTGEYSGYDTSGYSNWGQGTLVTVSSGGGGSGGGGSGGGGSQSVLTQPPSASGTPGQRVTISCSGSSSNIGSNTVNWYQRLPGAAPQLLIYNNDQRPSGIPDRFSGSKSGTSGSLVISGLQSEDEADYYCASWDDSLNGRVFGGGTKLTVLGDVREPKSSDKTHTCPPCPAPELLGGPSVFLFPPKPKDTLMISRTPEVTCVVVDVSHEDPEVKFNWYVDGVEVHNAKTKPREEQYNSTYRVVSVLTVLHQDWLNGKEYKCKVSNKALPAPIEKTISKAKGQPREPQVYTLPPSRDELTKNQVSLTCLVKGFYPSDIAVEWESNGQPENNYKTTPPVLDSDGSFFLYSKLTVDKSRWQQGNVFSCSVMHEALHNHYTQKSLSLSPGK

SEQ ID NO: 220 - DNA, 1488 bp, Artificial Sequence
  source: /note="Description of Artificial Sequence: Synthetic polynucleotide"
atggaagcaccagcgcagcttctcttcctcctgctactctggctcccagataccaccggtcaggtgcagctggtgcagtctgggggaggcttggtccagccgggggggtccctgagactctcctgtgcagcctctggattcacgtttagtacctatgccatgagttgggcccgccaggctccagggaaggggctggagtgggtctcaagtattagtggtgatggtggaagaattctcgatgcagactccgcgaagggccggttcaccatctccagagacaattccaagaacacgctgtatctgcaaatgaacggcctgagagtcgaggacacggccctttattactgtgcgagagcggacggtaactactggggcagggggacaatggtcaccgtctcttcaggtggaggcggttcaggcggaggtggcagcggcggtggcggatcgcagtctgtgctgactcagcctgcctccgtgtctgggtctcctggacagtcgatcaccatctcctgcactggaaccagcagtgacgttggtggttataactatgtctcctggtaccaacaacacccaggcaaagcccccaaactcatgatttatgagggcagtaagcggccctcaggggtttctaatcgcttctctggctccaagtctggcaacacggcctccctgacaatctctgggctccaggctgaggacgaggctgattattactgcagctcatatacaaccaggagcactcgagttttcggcggagggaccaagctgaccgtcctaggtgacgtacgcgagcccaaatcttctgacaaaactcacacatgcccaccgtgcccagcacctgaactcctgggtggaccgtcagtcttcctcttccccccaaaacccaaggacaccctcatgatctcccggacccctgaggtcacatgcgtggtggtggacgtgagccacgaagaccctgaggtcaagttcaactggtacgtggacggcgtggaggtgcataatgccaagacaaagccgcgggaggagcagtacaacagcacgtaccgtgtggtcagcgtcctcaccgtcctgcaccaggactggctgaatggcaaggagtacaagtgcaaggtctccaacaaagccctcccagcccccatcgagaaaaccatctccaaagccaaagggcagccccgagaaccacaggtgtacaccctgcccccatcccgggatgagctgaccaagaaccaggtcagcctgacctgcctggtcaaaggcttctatccaagcgacatcgccgtggagtgggagagcaatgggcagccggagaacaactacaagaccacgcctcccgtgctggactccgacggctccttcttcctctacagcaagctcaccgtggacaagagcaggtggcagcaggggaacgtcttctcatgctccgtgatgcatgaggctctgcacaaccactacacgcagaagagcctctccctgtctccgggtaaatga

SEQ ID NO: 221 - protein, 495 aa, Artificial Sequence
  source: /note="Description of Artificial Sequence: Synthetic polypeptide"
MEAPAQLLFLLLLWLPDTTGQVQLVQSGGGLVQPGGSLRLSCAASGFTFSTYAMSWARQAPGKGLEWVSSISGDGGRILDADSAKGRFTISRDNSKNTLYLQMNGLRVEDTALYYCARADGNYWGRGTMVTVSSGGGGSGGGGSGGGGSQSVLTQPASVSGSPGQSITISCTGTSSDVGGYNYVSWYQQHPGKAPKLMIYEGSKRPSGVSNRFSGSKSGNTASLTISGLQAEDEADYYCSSYTTRSTRVFGGGTKLTVLGDVREPKSSDKTHTCPPCPAPELLGGPSVFLFPPKPKDTLMISRTPEVTCVVVDVSHEDPEVKFNWYVDGVEVHNAKTKPREEQYNSTYRVVSVLTVLHQDWLNGKEYKCKVSNKALPAPIEKTISKAKGQPREPQVYTLPPSRDELTKNQVSLTCLVKGFYPSDIAVEWESNGQPENNYKTTPPVLDSDGSFFLYSKLTVDKSRWQQGNVFSCSVMHEALHNHYTQKSLSLSPGK

SEQ ID NO: 222 - DNA, 1506 bp, Artificial Sequence
  source: /note="Description of Artificial Sequence: Synthetic polynucleotide"
atggaagcaccagcgcagcttctcttcctcctgctactctggctcccagataccaccggtcaggtgcagctgcaggagtcggggggaggcgtggtccagcctggggggtccctgagactctcctgtgcagcgtctggattcaccttcagtggctatggcatgcactgggtccgccaggctccaggcaaggggctggagtgggtggcatctgtacggaacgatggaagtaatacatactacacagactccgtgaaggaccgattcaccatctccagagacaacaccaagaacacgctgtatctgcaaatgaacagcctgagagccgaggacacggccgtatattactgtgccaagtcgagaagagtgatgtatggcacctcctattactttgactactggggcagaggcaccctggtcaccgtctcctcaggtggaggcggttcaggcggaggtggcagcggcggtggcggatcgtctgagctgactcaggaccctgctgtgtctgtggccttgggacagacagtcaggatcacatgccaaggagacagcctcagaagctattatgcaagctggtaccagcagaagccaggacaggcccctgtacttgtcatctatggtaaaaacaaccggccctcagggatcccagaccgattctctggctccagctcaggaaacacagcttccttgaccatcactggggctcaggcggaagatgaggctgactattactgtaactcccgggacagcagtggtaaccatgtggtattcggcggagggaccaagctgaccgtcctaggtgacgtacgcgagcccaaatcttctgacaaaactcacacatgcccaccgtgcccagcacctgaactcctgggtggaccgtcagtcttcctcttccccccaaaacccaaggacaccctcatgatctcccggacccctgaggtcacatgcgtggtggtggacgtgagccacgaagaccctgaggtcaagttcaactggtacgtggacggcgtggaggtgcataatgccaagacaaagccgcgggaggagcagtacaacagcacgtaccgtgtggtcagcgtcctcaccgtcctgcaccaggactggctgaatggcaaggagtacaagtgcaaggtctccaacaaagccctcccagcccccatcgagaaaaccatctccaaagccaaagggcagccccgagaaccacaggtgtacaccctgcccccatcccgggatgagctgaccaagaaccaggtcagcctgacctgcctggtcaaaggcttctatccaagcgacatcgccgtggagtgggagagcaatgggcagccggagaacaactacaagaccacgcctcccgtgctggactccgacggctccttcttcctctacagcaagctcaccgtggacaagagcaggtggcagcaggggaacgtcttctcatgctccgtgatgcatgaggctctgcacaaccactacacgcagaagagcctctccctgtctccgggtaaatga

SEQ ID NO: 223 - protein, 501 aa, Artificial Sequence
  source: /note="Description of Artificial Sequence: Synthetic polypeptide"
MEAPAQLLFLLLLWLPDTTGQVQLQESGGGVVQPGGSLRLSCAASGFTFSGYGMHWVRQAPGKGLEWVASVRNDGSNTYYTDSVKDRFTISRDNTKNTLYLQMNSLRAEDTAVYYCAKSRRVMYGTSYYFDYWGRGTLVTVSSGGGGSGGGGSGGGGSSELTQDPAVSVALGQTVRITCQGDSLRSYYASWYQQKPGQAPVLVIYGKNNRPSGIPDRFSGSSSGNTASLTITGAQAEDEADYYCNSRDSSGNHVVFGGGTKLTVLGDVREPKSSDKTHTCPPCPAPELLGGPSVFLFPPKPKDTLMISRTPEVTCVVVDVSHEDPEVKFNWYVDGVEVHNAKTKPREEQYNSTYRVVSVLTVLHQDWLNGKEYKCKVSNKALPAPIEKTISKAKGQPREPQVYTLPPSRDELTKNQVSLTCLVKGFYPSDIAVEWESNGQPENNYKTTPPVLDSDGSFFLYSKLTVDKSRWQQGNVFSCSVMHEALHNHYTQKSLSLSPGK

SEQ ID NO: 224 - DNA, 1503 bp, Artificial Sequence
  source: /note="Description of Artificial Sequence: Synthetic polynucleotide"
atggaagcaccagcgcagcttctcttcctcctgctactctggctcccagataccaccggtcaggtgcagctgcaggagtcgggcgcaggactggtgaagccttcggggaccctgtccctcacctgcgctgtctctggtggctccatcagcagtggtaactggtggagttgggtccgccagcccccagggaaggggctggagtggattggggaaatctctcatagtgggagcaccaactacaacccgtccctcaagagtcgagtcaccatatcagtagacaagtccaagaaccagttctccctgaacctgagttctgtgaccgccgcagacacggccgtgtattactgtgcgagagtaaggggtacggtgggggatacacggggacctgactactggggccagggaaccctggtcaccgtctcgagtggtggaggcggttcaggcggaggtggcagcggcggtggcggatcgtctgagctgactcaggaccctgctgtgtctgtggccttgggacagacagtcaggatcacatgccaaggagacagcctcagaagctattatgcaagctggtaccagcagaagccaggacaggcccctgtacttgtcatctatggtaaaaacaaccggccctcagggatcccagaccgattctctggctccagctcaggaaacacagcttccttgaccatcactggggctcaggcggaagatgaggctgactattactgtaactcccgggacagcagtggtaaccatgtggtattcggcggagggaccaagctgaccgtcctaggtgacgtacgcgagcccaaatcttctgacaaaactcacacatgcccaccgtgcccagcacctgaactcctgggtggaccgtcagtcttcctcttccccccaaaacccaaggacaccctcatgatctcccggacccctgaggtcacatgcgtggtggtggacgtgagccacgaagaccctgaggtcaagttcaactggtacgtggacggcgtggaggtgcataatgccaagacaaagccgcgggaggagcagtacaacagcacgtaccgtgtggtcagcgtcctcaccgtcctgcaccaggactggctgaatggcaaggagtacaagtgcaaggtctccaacaaagccctcccagcccccatcgagaaaaccatctccaaagccaaagggcagccccgagaaccacaggtgtacaccctgcccccatcccgggatgagctgaccaagaaccaggtcagcctgacctgcctggtcaaaggcttctatccaagcgacatcgccgtggagtgggagagcaatgggcagccggagaacaactacaagaccacgcctcccgtgctggactccgacggctccttcttcctctacagcaagctcaccgtggacaagagcaggtggcagcaggggaacgtcttctcatgctccgtgatgcatgaggctctgcacaaccactacacgcagaagagcctctccctgtctccgggtaaatga

SEQ ID NO: 225 - protein, 500 aa, Artificial Sequence
  source: /note="Description of Artificial Sequence: Synthetic polypeptide"
MEAPAQLLFLLLLWLPDTTGQVQLQESGAGLVKPSGTLSLTCAVSGGSISSGNWWSWVRQPPGKGLEWIGEISHSGSTNYNPSLKSRVTISVDKSKNQFSLNLSSVTAADTAVYYCARVRGTVGDTRGPDYWGQGTLVTVSSGGGGSGGGGSGGGGSSELTQDPAVSVALGQTVRITCQGDSLRSYYASWYQQKPGQAPVLVIYGKNNRPSGIPDRFSGSSSGNTASLTITGAQAEDEADYYCNSRDSSGNHVVFGGGTKLTVLGDVREPKSSDKTHTCPPCPAPELLGGPSVFLFPPKPKDTLMISRTPEVTCVVVDVSHEDPEVKFNWYVDGVEVHNAKTKPREEQYNSTYRVVSVLTVLHQDWLNGKEYKCKVSNKALPAPIEKTISKAKGQPREPQVYTLPPSRDELTKNQVSLTCLVKGFYPSDIAVEWESNGQPENNYKTTPPVLDSDGSFFLYSKLTVDKSRWQQGNVFSCSVMHEALHNHYTQKSLSLSPGK

SEQ ID NO: 226 - DNA, 1503 bp, Artificial Sequence
  source: /note="Description of Artificial Sequence: Synthetic polynucleotide"
atggaagcaccagcgcagcttctcttcctcctgctactctggctcccagataccaccggtgaggtgcagctggtgcagtctgggggaggcctggtcaagcctggggggtccctgagactctcctgtgcagcgtctggattcaccttcagtagctatgggatgcactgggtccgccaggctccaggcaaggggctggagtgggtggcaggtattttttatgatggaggtaataaatactatgcagactccgtgaagggccgattcaccatctccagagacaattccaagaacacgctgtatctgcaaatgaacagcctgagagctgaggacacggctgtgtattactgtgcgagagataggggctactactacatggacgtctggggcaaagggaccacggtcaccgtctcctcaggtggaggcggttcaggcggaggtggctctggcggtggcggatcgcagtctgtgttgacgcagccgccctcagtgtctggggccccaggacagagggtcaccatctcctgcactgggagaagctccaacatcggggcgggtcatgatgtacactggtaccagcaacttccaggaacagcccccaaactcctcatctatggtgacagcaatcggccctcaggggtccctgaccgattctctggctccaggtctggcacctcagcctccctggccatcactgggctccaggctgaagatgaggctgattattactgccagtcctatgacagcagcctgaggggttcggtattcggcggagggaccaaggtcaccgtcctaggtgacgtacgcgagcccaaatcttctgacaaaactcacacatgcccaccgtgcccagcacctgaactcctgggtggaccgtcagtcttcctcttccccccaaaacccaaggacaccctcatgatctcccggacccctgaggtcacatgcgtggtggtggacgtgagccacgaagaccctgaggtcaagttcaactggtacgtggacggcgtggaggtgcataatgccaagacaaagccgcgggaggagcagtacaacagcacgtaccgtgtggtcagcgtcctcaccgtcctgcaccaggactggctgaatggcaaggagtacaagtgcaaggtctccaacaaagccctcccagcccccatcgagaaaaccatctccaaagccaaagggcagccccgagaaccacaggtgtacaccctgcccccatcccgggatgagctgaccaagaaccaggtcagcctgacctgcctggtcaaaggcttctatccaagcgacatcgccgtggagtgggagagcaatgggcagccggagaacaactacaagaccacgcctcccgtgctggactccgacggctccttcttcctctacagcaagctcaccgtggacaagagcaggtggcagcaggggaacgtcttctcatgctccgtgatgcatgaggctctgcacaaccactacacgcagaagagcctctccctgtctccgggtaaatga

SEQ ID NO: 227 - protein, 500 aa, Artificial Sequence
  source: /note="Description of Artificial Sequence: Synthetic polypeptide"
MEAPAQLLFLLLLWLPDTTGEVQLVQSGGGLVKPGGSLRLSCAASGFTFSSYGMHWVRQAPGKGLEWVAGIFYDGGNKYYADSVKGRFTISRDNSKNTLYLQMNSLRAEDTAVYYCARDRGYYYMDVWGKGTTVTVSSGGGGSGGGGSGGGGSQSVLTQPPSVSGAPGQRVTISCTGRSSNIGAGHDVHWYQQLPGTAPKLLIYGDSNRPSGVPDRFSGSRSGTSASLAITGLQAEDEADYYCQSYDSSLRGSVFGGGTKVTVLGDVREPKSSDKTHTCPPCPAPELLGGPSVFLFPPKPKDTLMISRTPEVTCVVVDVSHEDPEVKFNWYVDGVEVHNAKTKPREEQYNSTYRVVSVLTVLHQDWLNGKEYKCKVSNKALPAPIEKTISKAKGQPREPQVYTLPPSRDELTKNQVSLTCLVKGFYPSDIAVEWESNGQPENNYKTTPPVLDSDGSFFLYSKLTVDKSRWQQGNVFSCSVMHEALHNHYTQKSLSLSPGK

SEQ ID NO: 228 - DNA, 1500 bp, Artificial Sequence
  source: /note="Description of Artificial Sequence: Synthetic polynucleotide"
atggaagcaccagcgcagcttctcttcctcctgctactctggctcccagataccaccggtgaggtgcagctgttggagtctgggggaggcttggtacagcctggggggtccctgagactctcctgtgcagcctctggattcacctttagcagctatgccatgagctgggtccgccaggctccagggaaggggctggagtgggtctcagctattagtggtagtggtggtagcacatactacgcagactccgtgaagggccggttcaccatctccagagacaattccaagaacacgctgtatctgcaaatgaacagcctgagagccgaggacacggccgtgtattactgtgcgagaggcgggagtgggagtgactactggggccaggggacaatggtcaccgtctcgagtggaggcggcggttcaggcggaggtggctctggcggtggcggaagtgcacttaattttatgctgactcagccccactctgtgtcggggtctccggggaagacggtaaccatctcctgcacccgcagcagtggctacattgacagcaagtatgtgcagtggtaccagcagcgcccgggcagtgcccccaccactgtgatctatgaggataaccgaagaccctctggggtccctgatcggttctctggctccatcgacagctcctccaactctgcctccctcaccatctctggactggagactgaggacgaggctgactattactgtcagtcttatgatgacaccaatgtggtgttcggcggagggaccaaggtcaccgtcctaggtgacgtacgcgagcccaaatcttctgacaaaactcacacatgcccaccgtgcccagcacctgaactcctgggtggaccgtcagtcttcctcttccccccaaaacccaaggacaccctcatgatctcccggacccctgaggtcacatgcgtggtggtggacgtgagccacgaagaccctgaggtcaagttcaactggtacgtggacggcgtggaggtgcataatgccaagacaaagccgcgggaggagcagtacaacagcacgtaccgtgtggtcagcgtcctcaccgtcctgcaccaggactggctgaatggcaaggagtacaagtgcaaggtctccaacaaagccctcccagcccccatcgagaaaaccatctccaaagccaaagggcagccccgagaaccacaggtgtacaccctgcccccatcccgggatgagctgaccaagaaccaggtcagcctgacctgcctggtcaaaggcttctatccaagcgacatcgccgtggagtgggagagcaatgggcagccggagaacaactacaagaccacgcctcccgtgctggactccgacggctccttcttcctctacagcaagctcaccgtggacaagagcaggtggcagcaggggaacgtcttctcatgctccgtgatgcatgaggctctgcacaaccactacacgcagaagagcctctccctgtctccgggtaaatga

SEQ ID NO: 229 - protein, 499 aa, Artificial Sequence
  source: /note="Description of Artificial Sequence: Synthetic polypeptide"
MEAPAQLLFLLLLWLPDTTGEVQLLESGGGLVQPGGSLRLSCAASGFTFSSYAMSWVRQAPGKGLEWVSAISGSGGSTYYADSVKGRFTISRDNSKNTLYLQMNSLRAEDTAVYYCARGGSGSDYWGQGTMVTVSSGGGGSGGGGSGGGGSALNFMLTQPHSVSGSPGKTVTISCTRSSGYIDSKYVQWYQQRPGSAPTTVIYEDNRRPSGVPDRFSGSIDSSSNSASLTISGLETEDEADYYCQSYDDTNVVFGGGTKVTVLGDVREPKSSDKTHTCPPCPAPELLGGPSVFLFPPKPKDTLMISRTPEVTCVVVDVSHEDPEVKFNWYVDGVEVHNAKTKPREEQYNSTYRVVSVLTVLHQDWLNGKEYKCKVSNKALPAPIEKTISKAKGQPREPQVYTLPPSRDELTKNQVSLTCLVKGFYPSDIAVEWESNGQPENNYKTTPPVLDSDGSFFLYSKLTVDKSRWQQGNVFSCSVMHEALHNHYTQKSLSLSPGK

SEQ ID NO: 230 - DNA, 1500 bp, Artificial Sequence
  source: /note="Description of Artificial Sequence: Synthetic polynucleotide"
atggaagcaccagcgcagcttctcttcctcctgctactctggctcccagataccaccggtggggtgcagctggtggagtctgggggaggcctggtcaagcctggggggtccctgagactctcctgtgcagcctctggattcaccttcagtagctataacatgaactgggtccgccaggctccagggaagggactggagtgggtctcagctattagtggtagtggtggtagcacatactacgcagactccgtgacgggccggttcaccatctccagagacaattccaagaacacgctgtatctgcaaatgaacagcctgagagccgaggacacggccgtatattactgtgcgaaagataccagtggctggtacggggacggtatggacgtctggggccggggaaccctggtcaccgtctcgagtggtggaggcggttcaggcggaggtggcagcggcggtggcggatcggacatccagatgacccagtctccttccaccctgtctgcatctattggagacagagtcaccatcacctgccgggccagtgagggtatttatcactggttggcctggtatcagcagaagccagggaaagcccctaaactcctgatctataaggcctctagtttagccagtggggccccatcaaggttcagcggcagtggatcagggacagatttcactctcaccatcagcagcctgcagcctgatgattttgcaacttattactgccaacaatatagtaattatccgctcactttcggcggagggaccaagctggagatcaaacgtgacgtacgcgagcccaaatcttctgacaaaactcacacatgcccaccgtgcccagcacctgaactcctgggtggaccgtcagtcttcctcttccccccaaaacccaaggacaccctcatgatctcccggacccctgaggtcacatgcgtggtggtggacgtgagccacgaagaccctgaggtcaagttcaactggtacgtggacggcgtggaggtgcataatgccaagacaaagccgcgggaggagcagtacaacagcacgtaccgtgtggtcagcgtcctcaccgtcctgcaccaggactggctgaatggcaaggagtacaagtgcaaggtctccaacaaagccctcccagcccccatcgagaaaaccatctccaaagccaaagggcagccccgagaaccacaggtgtacaccctgcccccatcccgggatgagctgaccaagaaccaggtcagcctgacctgcctggtcaaaggcttctatccaagcgacatcgccgtggagtgggagagcaatgggcagccggagaacaactacaagaccacgcctcccgtgctggactccgacggctccttcttcctctacagcaagctcaccgtggacaagagcaggtggcagcaggggaacgtcttctcatgctccgtgatgcatgaggctctgcacaaccactacacgcagaagagcctctccctgtctccgggtaaatga

SEQ ID NO: 231 - protein, 499 aa, Artificial Sequence
  source: /note="Description of Artificial Sequence: Synthetic polypeptide"
MEAPAQLLFLLLLWLPDTTGGVQLVESGGGLVKPGGSLRLSCAASGFTFSSYNMNWVRQAPGKGLEWVSAISGSGGSTYYADSVTGRFTISRDNSKNTLYLQMNSLRAEDTAVYYCAKDTSGWYGDGMDVWGRGTLVTVSSGGGGSGGGGSGGGGSDIQMTQSPSTLSASIGDRVTITCRASEGIYHWLAWYQQKPGKAPKLLIYKASSLASGAPSRFSGSGSGTDFTLTISSLQPDDFATYYCQQYSNYPLTFGGGTKLEIKRDVREPKSSDKTHTCPPCPAPELLGGPSVFLFPPKPKDTLMISRTPEVTCVVVDVSHEDPEVKFNWYVDGVEVHNAKTKPREEQYNSTYRVVSVLTVLHQDWLNGKEYKCKVSNKALPAPIEKTISKAKGQPREPQVYTLPPSRDELTKNQVSLTCLVKGFYPSDIAVEWESNGQPENNYKTTPPVLDSDGSFFLYSKLTVDKSRWQQGNVFSCSVMHEALHNHYTQKSLSLSPGK

SEQ ID NO: 232 - DNA, 1503 bp, Artificial Sequence
  source: /note="Description of Artificial Sequence: Synthetic polynucleotide"
atggaagcaccagcgcagcttctcttcctcctgctactctggctcccagataccaccggtgaggtgcagctgttggagtctgggggaggcttggtacagcctggggggtccctgagactctcctgtgcagcctctggattcacctttagcagctatgccatgagctgggtccgccaggctccagggaaggggctggagtgggtctcagctattagtggtagtggtggtagcacatactacgcagactccgtgaagggccggttcaccatctccagagacaattccaagaacacgctgtatctgcaaatgaacagcctgagagccgaggacacggccgtgtattactgtgcgagagtcagcgggagccactttccattctttgactcctggggccaggggacaatggtcaccgtctcgagtggaggcggcggttcaggcggaggtggctctggcggtggcggaagtgcacagtctgtgctgactcagccaccctcggtgtcagtggccccaggacagacggccagaattacctgtgggggagacaagattggacataaaagtgtgcattggtatcagcagaagccaggccaggcccctgtgttgctcgtctatgatgataggaagcggccctcagggatccctgagcgattctctggctccaactctgggaacacggccaccctgaccatcagcagggtcgaggccggggatgaggctgcctatcactgtcaggtgtgggatagaagtagtgacccttatgtcttcggaactgggaccaaggtcaccgtcctaggtgacgtacgcgagcccaaatcttctgacaaaactcacacatgcccaccgtgcccagcacctgaactcctgggtggaccgtcagtcttcctcttccccccaaaacccaaggacaccctcatgatctcccggacccctgaggtcacatgcgtggtggtggacgtgagccacgaagaccctgaggtcaagttcaactggtacgtggacggcgtggaggtgcataatgccaagacaaagccgcgggaggagcagtacaacagcacgtaccgtgtggtcagcgtcctcaccgtcctgcaccaggactggctgaatggcaaggagtacaagtgcaaggtctccaacaaagccctcccagcccccatcgagaaaaccatctccaaagccaaagggcagccccgagaaccacaggtgtacaccctgcccccatcccgggatgagctgaccaagaaccaggtcagcctgacctgcctggtcaaaggcttctatccaagcgacatcgccgtggagtgggagagcaatgggcagccggagaacaactacaagaccacgcctcccgtgctggactccgacggctccttcttcctctacagcaagctcaccgtggacaagagcaggtggcagcaggggaacgtcttctcatgctccgtgatgcatgaggctctgcacaaccactacacgcagaagagcctctccctgtctccgggtaaatga

SEQ ID NO: 233 - protein, 500 aa, Artificial Sequence [sequence omitted]

SEQ ID NO: 234 - DNA, 60 bp, Artificial Sequence
  source: /note="Description of Artificial Sequence: Synthetic oligonucleotide"
atggaagcaccagcgcagcttctcttcctcctgctactctggctcccagataccaccggt

SEQ ID NO: 235 - protein, 20 aa, Artificial Sequence
  source: /note="Description of Artificial Sequence: Synthetic peptide"
MEAPAQLLFLLLLWLPDTTG

SEQ ID NO: 236 - DNA, 45 bp, Artificial Sequence
  source: /note="Description of Artificial Sequence: Synthetic oligonucleotide"
ggaggcggcggttcaggcggaggtggctctggcggtggcggaagt

SEQ ID NO: 237 - protein, 15 aa, Artificial Sequence
  source: /note="Description of Artificial Sequence: Synthetic peptide"
GGGGSGGGGSGGGGS

SEQ ID NO: 238 - DNA, 45 bp, Artificial Sequence
  source: /note="Description of Artificial Sequence: Synthetic oligonucleotide"
gagcccaaatcttctgacaaaactcacacatgcccaccgtgccca

SEQ ID NO: 239 - protein, 15 aa, Artificial Sequence
  source: /note="Description of Artificial Sequence: Synthetic peptide"
EPKSSDKTHTCPPCP

SEQ ID NO: 240 - DNA, 708 bp, Artificial Sequence
  source: /note="Description of Artificial Sequence: Synthetic polynucleotide"
gacgtacgcgagcccaaatcttctgacaaaactcacacatgcccaccgtgcccagcacctgaactcctgggtggaccgtcagtcttcctcttccccccaaaacccaaggacaccctcatgatctcccggacccctgaggtcacatgcgtggtggtggacgtgagccacgaagaccctgaggtcaagttcaactggtacgtggacggcgtggaggtgcataatgccaagacaaagccgcgggaggagcagtacaacagcacgtaccgtgtggtcagcgtcctcaccgtcctgcaccaggactggctgaatggcaaggagtacaagtgcaaggtctccaacaaagccctcccagcccccatcgagaaaaccatctccaaagccaaagggcagccccgagaaccacaggtgtacaccctgcccccatcccgggatgagctgaccaagaaccaggtcagcctgacctgcctggtcaaaggcttctatccaagcgacatcgccgtggagtgggagagcaatgggcagccggagaacaactacaagaccacgcctcccgtgctggactccgacggctccttcttcctctacagcaagctcaccgtggacaagagcaggtggcagcaggggaacgtcttctcatgctccgtgatgcatgaggctctgcacaaccactacacgcagaagagcctctccctgtctccgggtaaatga

SEQ ID NO: 241 - protein, 235 aa, Artificial Sequence
  source: /note="Description of Artificial Sequence: Synthetic polypeptide"
DVREPKSSDKTHTCPPCPAPELLGGPSVFLFPPKPKDTLMISRTPEVTCVVVDVSHEDPEVKFNWYVDGVEVHNAKTKPREEQYNSTYRVVSVLTVLHQDWLNGKEYKCKVSNKALPAPIEKTISKAKGQPREPQVYTLPPSRDELTKNQVSLTCLVKGFYPSDIAVEWESNGQPENNYKTTPPVLDSDGSFFLYSKLTVDKSRWQQGNVFSCSVMHEALHNHYTQKSLSLSPGK

SEQ ID NO: 242 - protein, 656 aa, Artificial Sequence
  source: /note="Description of Artificial Sequence: Synthetic polypeptide"
MELAALCRWGLLLALLPPGAASTQVCTGTDMKLRLPASPETHLDMLRHLYQGCQVVQGNLELTYLPTNASLSFLQDIQEVQGYVLIAHNQVRQVPLQRLRIVRGTQLFEDNYALAVLDNGDPLNNTTPVTGASPGGLRELQLRSLTEILKGGVLIQRNPQLCYQDTILWKDIFHKNNQLALTLIDTNRSRACHPCSPMCKGSRCWGESSEDCQSLTRTVCAGGCARCKGPLPTDCCHEQCAAGCTGPKHSDCLACLHFNHSGICELHCPALVTYNTDTFESMPNPEGRYTFGASCVTACPYNYLSTDVGSCTLVCPLHNQEVTAEDGTQRCEKCSKPCARVCYGLGMEHLREVRAVTSANIQEFAGCKKIFGSLAFLPESFDGDPASNTAPLQPEQLQVFETLEEITGYLYISAWPDSLPDLSVFQNLQVIRGRILHNGAYSLTLQGLGISWLGLRSLRELGSGLALIHHNTHLCFVHTVPWDQLFRNPHQALLHTANRPEDECVGEGLACHQLCARGHCWGPGPTQCVNCSQFLRGQECVEECRVLQGLPREYVNARHCLPCHPECQPQNGSVTCFGPEADQCVACAHYKDPPFCVARCPSGVKPDLSYMPIWKFPDEEGACQPCPINCTHSCVDLDDKGCPAEQRASPLTSIIS

SEQ ID NO: 243 - protein, 647 aa, Artificial Sequence
  source: /note="Description of Artificial Sequence: Synthetic polypeptide"
MELAALCRWGLLLALLPPGAASTQVCTGTDMKLRLPASPETHLDMLRHLYQGCQVVQGNLELTYLPTNASLSFLQDIQEVQGYVLIAHNQVRQVPLQRLRIVRGTQLFEDNYALAVLDNGDPLNNTTPVTGASPGGLRELQLRSLTEILKGGVLIQRNPQLCYQDTILWKDIFHKNNQLALTLIDTNRSRACHPCSPMCKGSRCWGESSEDCQSLTRTVCAGGCARCKGPLPTDCCHEQCAAGCTGPKHSDCLACLHFNHSGICELHCPALVTYNTDTFESMPNPEGRYTFGASCVTACPYNYLSTDVGSCTLVCPLHNQEVTAEDGTQRCEKCSKPCARVCYGLGMEHLREVRAVTSANIQEFAGCKKIFGSLAFLPESFDGDPASNTAPLQPEQLQVFETLEEITGYLYISAWPDSLPDLSVFQNLQVIRGRILHNGAYSLTLQGLGISWLGLRSLRELGSGLALIHHNTHLCFVHTVPWDQLFRNPHQALLHTANRPEDECVGEGLACHQLCARGHCWGPGPTQCVNCSQFLRGQECVEECRVLQGLPREYVNARHCLPCHPECQPQNGSVTCFGPEADQCVACAHYKDPPFCVARCPSGVKPDLSYMPIWKFPDEEGACQPCPINCTHSCVDLDDKGCPAEQR

SEQ ID NO: 244 - protein, 599 aa, Artificial Sequence
  source: /note="Description of Artificial Sequence: Synthetic polypeptide"
MELAALCRWGLLLALLPPGAASTQVCTGTDMKLRLPASPETHLDMLRHLYQGCQVVQGNLELTYLPTNASLSFLQDIQEVQGYVLIAHNQVRQVPLQRLRIVRGTQLFEDNYALAVLDNGDPLNNTTPVTGASPGGLRELQLRSLTEILKGGVLIQRNPQLCYQDTILWKDIFHKNNQLALTLIDTNRSRACHPCSPMCKGSRCWGESSEDCQSLTRTVCAGGCARCKGPLPTDCCHEQCAAGCTGPKHSDCLACLHFNHSGICELHCPALVTYNTDTFESMPNPEGRYTFGASCVTACPYNYLSTDVGSCTLVCPLHNQEVTAEDGTQRCEKCSKPCARVCYGLGMEHLREVRAVTSANIQEFAGCKKIFGSLAFLPESFDGDPASNTAPLQPEQLQVFETLEEITGYLYISAWPDSLPDLSVFQNLQVIRGRILHNGAYSLTLQGLGISWLGLRSLRELGSGLALIHHNTHLCFVHTVPWDQLFRNPHQALLHTANRPEDECVGEGLACHQLCARGHCWGPGPTQCVNCSQFLRGQECVEECRVLQGLPREYVNARHCLPCHPECQPQNGSVTCFGPEADQCVACAHYKDPPFCVAR

SEQ ID NO: 245 - protein, 338 aa, Artificial Sequence
  source: /note="Description of Artificial Sequence: Synthetic polypeptide"
MELAALCRWGLLLALLPPGAASTQVCTGTDMKLRLPASPETHLDMLRHLYQGCQVVQGNLELTYLPTNASLSFLQDIQEVQGYVLIAHNQVRQVPLQRLRIVRGTQLFEDNYALAVLDNGDPLNNTTPVTGASPGGLRELQLRSLTEILKGGVLIQRNPQLCYQDTILWKDIFHKNNQLALTLIDTNRSRACHPCSPMCKGSRCWGESSEDCQSLTRTVCAGGCARCKGPLPTDCCHEQCAAGCTGPKHSDCLACLHFNHSGICELHCPALVTYNTDTFESMPNPEGRYTFGASCVTACPYNYLSTDVGSCTLVCPLHNQEVTAEDGTQRCEKCSKPC

SEQ ID NO: 246 - protein, 1255 aa, Homo sapiens [sequence omitted]

SEQ ID NO: 247 - DNA, 20 bp, Artificial Sequence
  source: /note="Description of Artificial Sequence: Synthetic primer"
ggaaacagctatgaccatga

SEQ ID NO: 248 - DNA, 21 bp, Artificial Sequence
  source: /note="Description of Artificial Sequence: Synthetic primer"
ctcttctgagatgagtttttg

SEQ ID NO: 249 - DNA, 18 bp, Artificial Sequence
  source: /note="Description of Artificial Sequence: Synthetic primer"
ggagattttcaacgtgaa

SEQ ID NO: 250 - DNA, 21 bp, Artificial Sequence
  source: /note="Description of Artificial Sequence: Synthetic primer"
ctcttctgagatgagtttttg

SEQ ID NO: 251 - protein, 118 aa, Artificial Sequence
  source: /note="Description of Artificial Sequence: Synthetic polypeptide"
EVQLLESGGGLVQPGGSLRLSCAASGFTFSSYAMSWVRQTPGKGLEWVSAISGSGGSTYYANSVKGRFTISRDNSKNTLYLQMNSLRAEDTAVYYCARGGGYNPFDSWGQGTMVTVSS

SEQ ID NO: 252 - DNA, 354 bp, Artificial Sequence
  source: /note="Description of Artificial Sequence: Synthetic polynucleotide"
gaggtgcagctgttggagtctgggggaggcttggtacagcctggggggtccctgagactctcctgtgcagcctctggattcacctttagcagctatgccatgagctgggtccgccagactccagggaaggggctggagtgggtctcagctattagtggtagtggtggtagcacatactacgcaaactccgtgaagggccggttcaccatctccagagacaattccaagaacacgctgtatctgcaaatgaacagcctgagagccgaggacacggccgtgtattactgtgcgcgggggggaggctacaacccttttgactcctggggccaggggacaatggtcaccgtctcgagt

SEQ ID NO: 253 - protein, 110 aa, Artificial Sequence
  source: /note="Description of Artificial Sequence: Synthetic polypeptide"
QSALTQPASVSGSPGQSITISCTGTGSDVGGYNYVSWYQQHPGKAPKLMIYEVINRPSGISNRFSGSKSGNTASLTISGLQAEDEADYYCGSYSSSSTLVFGGGTKLTVL

SEQ ID NO: 254 - DNA, 330 bp, Artificial Sequence
  source: /note="Description of Artificial Sequence: Synthetic polynucleotide"
cagtctgccctgactcagcctgcctccgtgtctgggtctcctggacagtcgatcaccatctcctgcactggaaccggcagtgacgttggtggttataactatgtctcctggtaccaacagcacccaggcaaagcccccaaactcatgatttatgaggtcattaatcggccctcagggatttctaatcgcttctctggctccaagtctggcaacacggcctccctgaccatctctgggctccaggctgaggacgaggctgattattactgcggctcatattcaagcagcagcactcttgtattcggcggagggaccaagctgaccgtccta

SEQ ID NO: 255 - protein, 119 aa, Artificial Sequence
  source: /note="Description of Artificial Sequence: Synthetic polypeptide"
EVQLLESGGGLVQPGGSLRLSCAASGFTFSSYAMSWVRQAPGKGLEWVSAISGSGGSTYYADSVKGRFTISRDNSKNTLYLQMNSLRAEDTAVYYCAGAADYSNYFDFWGQGTMVTVSS

SEQ ID NO: 256 - DNA, 357 bp, Artificial Sequence
  source: /note="Description of Artificial Sequence: Synthetic polynucleotide"
gaggtgcagctgttggagtctgggggaggcttggtacagcctggggggtccctgagactctcctgtgcagcctctggattcacctttagcagctatgccatgagctgggtccgccaggctccagggaaggggctggagtgggtctcagctattagtggtagtggtggtagcacatactacgcagactccgtgaagggccggttcaccatctccagagacaattccaagaacacgctgtatctgcaaatgaacagcctgagagccgaggacacggccgtgtattactgtgcgggagcggcggactacagtaattactttgacttttggggccaagggacaatggtcaccgtctcgagt

SEQ ID NO: 257 - protein, 111 aa, Artificial Sequence
  source: /note="Description of Artificial Sequence: Synthetic polypeptide"
QSVLTQPPSVSGAPGQRVTISCTGSSSNIGAGYDVHWYQQLPGAAPKLLIYGNINRPSGVPDRFSGSKSGTSASLAITGLQAEDEGDYYCQSYDRSLSAKLFGGGTKVTVL

SEQ ID NO: 258 - DNA, 333 bp, Artificial Sequence
  source: /note="Description of Artificial Sequence: Synthetic polynucleotide"
cagtctgtgctgactcagccaccctcagtgtctggggccccagggcagagggtcaccatctcctgcactgggagcagctccaacatcggggcaggttatgatgtacactggtaccagcaacttccaggagcagcccccaaactcctcatctatgggaacatcaatcggccctcaggggtccctgaccgattctctggctccaagtctggcacctcagcctccctggccatcactgggctccaggctgaggatgagggtgattattactgccagtcctatgacagaagcctgagtgctaagctgttcggcggagggaccaaggtcaccgtccta

SEQ ID NO: 259 - protein, 126 aa, Artificial Sequence
  source: /note="Description of Artificial Sequence: Synthetic polypeptide"
EVQLLESGGGLVQPGGSLRLSCAASGFTFSSYAMSWVRQAPGKGLEWVSAISGSGGSTYYADSVKGRFTISRDNSKNALYLQMNSLRAEDTAVYYCARDLGIDPLWSGYYTPLDYWGRGTMVTVSS

SEQ ID NO: 260 - DNA, 378 bp, Artificial Sequence
  source: /note="Description of Artificial Sequence: Synthetic polynucleotide"
gaggtgcagctgttggagtctgggggaggcttggtacagcctggggggtccctgagactctcctgtgcagcctctggattcacctttagcagctatgccatgagctgggtccgccaggctccagggaaggggctggagtgggtctcagctattagtggtagtggtggtagcacatactacgcagactccgtgaagggccggttcaccatctccagagacaattccaagaacgcgctgtatctgcaaatgaacagcctgagagccgaggacacggccgtgtattactgtgcgagagatctgggaatagaccccctttggagtggttattacacaccccttgactattggggccgggggacaatggtcaccgtctcgagt

SEQ ID NO: 261 - protein, 108 aa, Artificial Sequence
  source: /note="Description of Artificial Sequence: Synthetic polypeptide"
SSELTQDPALSVALGQTVRITCQGDSLGGFHASWYQEKPGQAPVFVLYGKNNRPSGIPDRFSGSTSGNTAALTITGAQAEDEADYYCSSRDRSGNHRVFGGGTKLTVL

SEQ ID NO: 262 - DNA, 324 bp, Artificial Sequence
  source: /note="Description of Artificial Sequence: Synthetic polynucleotide"
tcttctgagctgactcaggaccctgctctgtcggtggccttgggacagacagtcaggatcacatgtcaaggggacagcctcggaggctttcatgcaagctggtaccaggagaagccaggacaggcccctgtatttgtcctctatggtaaaaacaaccggccctcagggatcccagaccgattctctggctccacctcaggtaacacagctgccctgaccatcactggggctcaggcggaagatgaggctgactattactgtagctcccgggacagaagtggtaaccatcgcgtcttcggcggagggaccaagctgaccgtccta

SEQ ID NO: 263 - protein, 122 aa, Artificial Sequence
  source: /note="Description of Artificial Sequence: Synthetic polypeptide"
EVQLLESGGGLVQPGGSLRLSCAASGFTFSSYAMSWVRQAPGKGLEWVSAISGSGGSTYYADSVKGRFTISRDNSKNTLYLQMNSLRAEDTAVYYCARDRALVGATRTFGYWGQGTTVTVSS

SEQ ID NO: 264 - DNA, 366 bp, Artificial Sequence
  source: /note="Description of Artificial Sequence: Synthetic polynucleotide"
gaggtgcagctgttggagtctgggggaggcttggtacagcctggggggtccctgagactctcctgtgcagcctctggattcacctttagcagctatgccatgagctgggtccgccaggctccagggaaggggctggagtgggtctcagctattagtggtagtggtggtagcacatactacgcagactccgtgaagggccggttcaccatctccagagacaattccaagaacacgctgtatctgcaaatgaacagcctgagagccgaggacacggccgtgtattactgtgcgagagatcgagccctagtgggagctactcgaacttttggctactgggggcaggggaccacggtcaccgtctcgagt

SEQ ID NO: 265 - protein, 111 aa, Artificial Sequence
  source: /note="Description of Artificial Sequence: Synthetic polypeptide"
QAVLTQPSSVSGAPGQRVTISCTGSSSNIGAGYDVHWYQQLPGTAPKLLIYGDTNRPSGVPDRFSGSKSGTSASLAITGLQAEDEADYYCQSFDSSLSGSVFGGGTKLTVL

SEQ ID NO: 266 - DNA, 333 bp, Artificial Sequence
  source: /note="Description of Artificial Sequence: Synthetic polynucleotide"
caggctgtgctgactcagccgtcctcagtgtctggggccccagggcagagggtcaccatctcctgcactgggagcagctccaacatcggggcaggttatgatgtacactggtaccagcagcttccaggaacagcccccaaactcctcatctatggtgacaccaatcggccctcaggggtccctgaccgattctctggctccaagtctggcacctcagcctccctggccatcactgggctccaggctgaggatgaggctgattattactgccagtcctttgacagcagcctcagtggttcggtgttcggcggagggaccaagctgaccgtccta

SEQ ID NO: 267 - protein, 126 aa, Artificial Sequence
  source: /note="Description of Artificial Sequence: Synthetic polypeptide"
EVLLLESGGGLVQPGGSLRLSCAASGFTFSSYAMSWVRQAPGKGLEWVSAISGSGGSTYYADSAKGRFTISRDNSKNTLYLQMNSLRAEDTAVYYCARDRVSNWNYYGQDSYFDYWGQGTMVTVSS

SEQ ID NO: 268 - DNA, 378 bp, Artificial Sequence
  source: /note="Description of Artificial Sequence: Synthetic polynucleotide"
gaggtgctgctgttggagtctgggggaggcttggtacagcctggggggtccctgagactctcctgtgcagcctctggattcacctttagcagctatgccatgagctgggtccgccaggctccagggaaggggctggagtgggtctcagctatcagtggtagtggtggtagcacatactacgcagactccgcgaagggccggttcaccatctccagagacaattccaagaacacgctgtatctgcaaatgaacagcctgagagccgaggacacggccgtgtattactgtgcgagggacagggtctctaactggaactactacggccaggacagctactttgactactggggccaagggacaatggtcaccgtctcgagt

SEQ ID NO: 269 - protein, 110 aa, Artificial Sequence
  source: /note="Description of Artificial Sequence: Synthetic polypeptide"
QAVLTQPPSASGTPGQRVTISCSGSSSNIGSNYVYWYQQLPGTAPKVLIYRNNQRPSGVPDRFSGSKSGTSASLAISGLRSEDEADYYCASWDGSLSGPVFGGGTKLTVL

SEQ ID NO: 270 - DNA, 330 bp, Artificial Sequence
  source: /note="Description of Artificial Sequence: Synthetic polynucleotide"
caggctgtgctgactcagccaccctcagcgtctgggacccccgggcagagggtcaccatctcttgttctggaagcagctccaacatcggaagtaattatgtatactggtaccagcaactcccaggaacggcccccaaagtcctcatctataggaataatcagcggccctcaggggtccctgaccgattctctggctccaagtctggcacctcagcgtccctggccatcagtgggctccggtccgaggatgaggctgattattactgtgcatcatgggatggcagcctgagtggtccggtgttcggcggagggaccaagctgaccgtccta

SEQ ID NO: 271 - protein, 126 aa, Artificial Sequence
  source: /note="Description of Artificial Sequence: Synthetic polypeptide"
EVQLLESGGGLVQPGGSLRLSCAASGFTFSSYAMSWVRQAPGKGLEWVSAISGSGGSTYYADSVKGRFTISRDNSKNTLYLQMNSLRAEDTAVYYCARDRVSNWNYYGQDSYFGYWGQGTMVTVSS

SEQ ID NO: 272 - DNA, 378 bp, Artificial Sequence
  source: /note="Description of Artificial Sequence: Synthetic polynucleotide"
gaggtgcagctgttggagtctgggggaggcttggtacagcctggggggtccctgagactctcctgtgcagcctctggattcacctttagcagctatgccatgagctgggtccgccaggctccagggaaggggctggagtgggtctcagctattagtggtagtggtggtagcacatactacgcagactccgtgaagggccggttcaccatctccagagacaattccaagaacacgctgtatctgcaaatgaacagcctgagagccgaggacacggccgtgtattactgtgcgagggacagggtctctaactggaactactacggccaggacagctactttggctactggggccaggggacaatggtcaccgtctcgagt

SEQ ID NO: 273 - protein, 110 aa, Artificial Sequence
  source: /note="Description of Artificial Sequence: Synthetic polypeptide"
SYELTQPPSASGTPGQRVTISCSGSSSNIGSNTVTWYQQLPGTAPQLLFHNNDQRPSGVPDRFSGSKSGTSGSLAISGLQSEDEADYYCSAWDDGLNAVIFGGGTKLTVL

SEQ ID NO: 274 - DNA, 330 bp, Artificial Sequence
  source: /note="Description of Artificial Sequence: Synthetic polynucleotide"
tcctatgagctgactcagccaccctcagcgtctgggacccccgggcagagggtcaccatctcttgttctggaagcagctccaacatcggaagtaatactgtaacctggtaccagcagctcccaggaacggccccccaactcctcttccataataatgaccagcggccctcaggggtccctgaccgattctctggctccaagtctggcacctcaggctccctggccatcagtgggctgcagtctgaggatgaggctgattattactgttcagcatgggatgacggcctgaatgctgtaatattcggcggagggaccaagctgaccgtccta

SEQ ID NO: 275 - protein, 128 aa, Artificial Sequence
  source: /note="Description of Artificial Sequence: Synthetic polypeptide"
EVQLLESGGGLVQPGGSLRLSCAASGFTFSSYAMSWVRQAPGKGLEWVSAISGSGGSTYYADSVKGRFTISRDNSKNTLYLQMNSLRAEDTAVYYCARDRVYDFWSGYYTRYNWFDPWGRGTTVTVSS

SEQ ID NO: 276 - DNA, 384 bp, Artificial Sequence
  source: /note="Description of Artificial Sequence: Synthetic polynucleotide"
gaggtgcagctgttggagtctgggggaggcttggtacagcctggggggtccctgagactctcctgtgcagcctctggattcacctttagcagctatgccatgagctgggtccgccaggctccagggaaggggctggagtgggtctcagctattagtggtagtggtggtagcacatactacgcagactccgtgaagggccggttcaccatctccagagacaattccaagaacacgctgtatctgcaaatgaacagcctgagagccgaggacacggccgtgtattactgtgcgagagatcgcgtttacgatttttggagtggttattatacgaggtacaactggttcgacccctgggggcgagggaccacggtcaccgtctcgagt

SEQ ID NO: 277 - protein, 110 aa, Artificial Sequence
  source: /note="Description of Artificial Sequence: Synthetic polypeptide"
QAVLTQPSSASGTPGQRVTISCSGSSSNIGSNYVYWYQQLPGTAPKLLIYRNNQRPSGVPDRFSGSKSGTSASLAISGLRSEDEADYYCAAWDDSLSSPVFGGGTKVTVL

SEQ ID NO: 278 - DNA, 330 bp, Artificial Sequence
  source: /note="Description of Artificial Sequence: Synthetic polynucleotide"
  modified_base (172)..(172): a, c, g, t, unknown or other
caggctgtgctgactcagccgtcctcagcgtctgggacccccgggcagagggtcaccatctcttgttctggaagcagctccaacatcggaagtaattatgtatactggtaccagcagctcccaggaacggcccccaaactcctcatctataggaataatcagcggccctcangggtccctgaccgattctctggctccaagtctggcacctcagcctccctggccatcagtgggctccggtccgaggatgaggctgattattactgtgcagcatgggatgacagcctgagtagtccggtgttcggcggagggaccaaggtcaccgtccta

SEQ ID NO: 279 - protein, 123 aa, Artificial Sequence
  source: /note="Description of Artificial Sequence: Synthetic polypeptide"
EVQLVQSGGGLVQPGGSLRLSCAASGFTFSSYPMHWVRQAPGKGLEWVAVVSFDGSKKYSADSVKGRFTISRDISKNTLYLQMNSLRAEDTAVYYCAKDRYDSGTFYYGMDVWGRGTLVTVSS

SEQ ID NO: 280 - DNA, 369 bp, Artificial Sequence
  source: /note="Description of Artificial Sequence: Synthetic polynucleotide"
gaggtgcagctggtgcagtctgggggaggcttggtacagcctgggggatccctgagactctcctgtgcagcctctggattcacctttagcagctatcccatgcactgggtccgccaggctccaggcaaggggctggagtgggtggcagttgtatcgttcgatggatctaagaaatactctgcagactccgtgaagggccgattcaccatctccagagacatctccaagaacacgctgtatctgcaaatgaacagcctgagagctgaggacacggctgtatattactgtgcgaaagatcgctatgattcggggactttctactacggcatggacgtctggggccggggcaccctggtcaccgtctcgagt

SEQ ID NO: 281 - protein, 110 aa, Artificial Sequence
  source: /note="Description of Artificial Sequence: Synthetic polypeptide"
QSALTQPASVSGSRGQSITISCTGTTGDVGGYDYVSWYQQHPGRAPKLLIYGNSNRPSGVPDRFSASKSGNTASLTISGLQAEDEADYFCSTYAPPGIIMFGGGTKLTVL

SEQ ID NO: 282 - DNA, 330 bp, Artificial Sequence
  source: /note="Description of Artificial Sequence: Synthetic polynucleotide"
cagtctgccctgactcagcctgcctccgtgtctggatctcgtggacagtcgatcaccatctcctgcactggaaccactggtgacgttggtggttatgactatgtctcctggtaccaacagcacccaggcagagcccccaaactcctcatctatggtaacagcaatcggccctcaggggtccctgatcgcttctctgcctccaagtccggcaatacggcctccctgaccatctctggactccaggctgaggatgaggctgattatttctgcagcacatatgcaccccccggtattattatgttcggcggagggaccaagctgaccgtccta

SEQ ID NO: 283 - protein, 122 aa, Artificial Sequence
  source: /note="Description of Artificial Sequence: Synthetic polypeptide"
EVQLLESGGGLVQPGGSLRLSCAASGFTFSSYAISWVRQAPGKGLEWVSAISGSGGSTYYADSVKGRFTISRDNSKNTLYLQMNSLRAEDTAVYYCARDSSRVGAYLVFDYWGRGTMVTVSS

SEQ ID NO: 284 - DNA, 366 bp, Artificial Sequence
  source: /note="Description of Artificial Sequence: Synthetic polynucleotide"
gaggtgcagctgttggagtctgggggaggcttggtacagcctggggggtccctgagactctcctgtgcagcctctggattcacctttagcagctatgccataagctgggtccgccaggctccagggaaggggctggagtgggtctcagctattagtggtagtggtggtagcacatactacgcagactccgtgaagggccggttcaccatctccagagacaattccaagaacacgctgtatctgcaaatgaacagcctgagagccgaggacacggccgtgtattactgtgcgagagattcgagtagggtgggagcttatctggtgtttgactactggggccgggggacaatggtcaccgtctcgagt

SEQ ID NO: 285 - protein, 111 aa, Artificial Sequence
  source: /note="Description of Artificial Sequence: Synthetic polypeptide"
QSVLTQPPSVSGAPGQRVTISCTGSSSNIGAGYDVHWYQQLPGTAPKLLIYGNSKRPSGVPDRFSGSKSGTSASLALTGLQAEDEADYYCQSYDSSLSGYVFGTGTKVTVL

SEQ ID NO: 286 - DNA, 333 bp, Artificial Sequence
  source: /note="Description of Artificial Sequence: Synthetic polynucleotide"
cagtctgtgctgacgcagccgccctcagtgtctggggccccagggcagagggtcaccatctcctgcactgggagcagctccaacatcggggcaggttatgatgtacactggtaccagcagcttccaggaacagcccccaaactcctcatctatggtaacagcaaacgcccctcaggggtccctgaccgattctctggctccaagtctggcacctcagcctccctggccctcactgggctccaggctgaggatgaggctgattattactgccagtcctatgacagcagcctgagtggttatgtcttcggaactgggaccaaggtcaccgtccta

SEQ ID NO: 287 - protein, 119 aa, Artificial Sequence
  source: /note="Description of Artificial Sequence: Synthetic polypeptide"
QMQLVQSGAEVKKPGASVKVSCKASGYTFTSYYIHWVRQAPGQGPEWMGIILPSGGSTSYAQEFQGRLSMTRDTSTSTVYMELSDLRSDDTAIYYCARDYDRSAYLDIWGRGTMVTVSS

SEQ ID NO: 288 - DNA, 357 bp, Artificial Sequence
  source: /note="Description of Artificial Sequence: Synthetic polynucleotide"
cagatgcagctggtgcagtctggggctgaggtgaagaagcctggggcctcagtgaaggtttcctgcaaggcatctggatacaccttcaccagctactatatacactgggtgcgacaggcccctggacagggccctgagtggatgggaataatcctccctagtggtggcagcaccagctacgcacaggagttccagggcagactctccatgaccagggacacgtccacgagcacagtgtacatggagctgagcgacctgagatctgacgacacggccatttattattgtgcgagagactatgataggagtgcttatcttgatatctggggccgagggacaatggtcaccgtctcgagt

SEQ ID NO: 289 - protein, 111 aa, Artificial Sequence
  source: /note="Description of Artificial Sequence: Synthetic polypeptide"
QSVLTQPPSASGTPGQRVTISCSGSSSNIGRNTVNWYKQFPGTAPKLLIYSDNKRPSGIPDRFSGSKSGTSASLAISGLQSGDEADYYCAAWDDSLNGHVVFGGGTKLTVL

SEQ ID NO: 290 - DNA, 333 bp, Artificial Sequence
  source: /note="Description of Artificial Sequence: Synthetic polynucleotide"
cagtctgtgttgacgcagccgccctcagcgtctgggacccccgggcagagggtcaccatctcttgttctggaagcagctccaacatcggaagaaatactgtaaactggtacaagcagttcccaggaacggcccccaaactcctcatctatagtgataataagcggccctcagggatccctgaccgattctctggctccaagtctggcacctcagcctccctggccatcagtgggctccagtctggggatgaggctgattattactgtgccgcatgggatgacagcctgaatggccatgtggtattcggcggagggaccaagctgaccgtccta

SEQ ID NO: 291 - protein, 121 aa, Artificial Sequence
  source: /note="Description of Artificial Sequence: Synthetic polypeptide"
EVQLLESGGGLVQPGGSLRLSCAASGFTFSSYAMSWVRQAPGKGLEWVSAISGSGGSTYYADSVKGRFTISRDNSKNTLYLQMNGLRVEDTAVYYCAKELVSRGSLTFDYWGKGTMVTVSS

SEQ ID NO: 292 - DNA, 363 bp, Artificial Sequence
  source: /note="Description of Artificial Sequence: Synthetic polynucleotide"
gaggtgcagctgttggagtctgggggaggcttggtacagcctggggggtccctgagactctcctgtgcagcctctggattcacctttagcagctatgccatgagctgggtccgccaggctccagggaaggggctggagtgggtctcagctattagtggtagtggtggtagcacatactacgcagactccgtgaagggccggttcaccatctccagagacaattccaagaacacgctgtatctgcaaatgaacggcctgagagtcgaggacacggccgtgtattactgtgcgaaagaattggtcagtagagggagcctcacctttgactactggggcaaggggacaatggtcaccgtctcgagt

SEQ ID NO: 293 - protein, 111 aa, Artificial Sequence
  source: /note="Description of Artificial Sequence: Synthetic polypeptide"
QSVLTQPPSVSGAPGQGVTISCTGSSSNIGADFAVHWYQQLPGTAPKLLINGSSHRPSGVPDRFSGSKSGPSASLAITGLQADDEADYFCQSYDYRLNALVFGGGTKLTVL

SEQ ID NO: 294 - DNA, 333 bp, Artificial Sequence
  source: /note="Description of Artificial Sequence: Synthetic polynucleotide"
cagtctgtgttgacgcagccgccctcagtgtctggggccccagggcagggggtcaccatctcctgcactgggagcagctccaacatcggggcagattttgctgtacactggtaccaacaacttccagggacagcccccaaactcctcatcaatggtagcagccatcggccctcaggggtccctgaccgattctctggctccaagtctggcccctcagcctccctggccatcactgggctccaagccgacgatgaggctgattatttttgccagtcctatgactacagactcaatgctttagtgttcggcggagggaccaagctgaccgtccta

SEQ ID NO: 295 - protein, 118 aa, Artificial Sequence
  source: /note="Description of Artificial Sequence: Synthetic polypeptide"
EVQLLESGGGLVQPGGSLRLSCAASGFTFSSYAMSWVRQAPGKGLEWVSAISGSGGSTYYADSVKGRFTISRDNSKNTLYLQMNSLRAEDTAVYYCARGHKMGYFDYWGRGTLVTVSS

SEQ ID NO: 296 - DNA, 354 bp, Artificial Sequence
  source: /note="Description of Artificial Sequence: Synthetic polynucleotide"
gaggtgcagctgttggagtctgggggaggcttggtacagcctggggggtccctgagactctcctgtgcagcctctggattcacctttagcagctatgccatgagctgggtccgccaggctccagggaaggggctggagtgggtctcagctattagtggtagtggtggtagcacatactacgcagactccgtgaagggccggttcaccatctccagagacaattccaagaacacgctgtatctgcaaatgaacagcctgagagccgaggacacggccgtgtattactgtgcgagaggtcacaaaatgggatactttgactactggggccggggcaccctggtcaccgtctcgagt

SEQ ID NO: 297 - protein, 109 aa, Artificial Sequence
  source: /note="Description of Artificial Sequence: Synthetic polypeptide"
SSELTQDPAVSVALGQSVTITCRGASLSNYYASWYQQRPGQAPLLVVSDNNIRPSGIPDRFSGSRSGTTASLSITGAQAEDEADYYCHSRASSDTHVRVFGGGTKLTVL

SEQ ID NO: 298 - DNA, 327 bp, Artificial Sequence
  source: /note="Description of Artificial Sequence: Synthetic polynucleotide"
tcttctgagctgactcaggaccctgctgtgtccgtggccttgggacagtcagtcaccatcacgtgtcggggagccagcctcagcaactattatgcaagctggtaccagcagaggccaggacaagcccctctacttgtcgtctctgataacaacatccggccctcagggatcccagaccgattctctggctccaggtcaggaaccacagcttccttgagcatcactggggctcaggcggaagatgaggctgactattactgtcactcccgtgccagcagtgacacccatgtccgggtgtttggcggcgggaccaagctgaccgtccta

SEQ ID NO: 299 - protein, 122 aa, Artificial Sequence
  source: /note="Description of Artificial Sequence: Synthetic polypeptide"
EVQLVQSGAEVKQPGESLKISCKGSGYSFSNYWIGWVRQMPGKGLEWMGIIYPDDSDTRYSPSFQGQVTISADRSISTAYLQWSSLKASDTATYYCARGNVINGNTNAFDIWGRGTTVTVSS

SEQ ID NO: 300 - DNA, 366 bp, Artificial Sequence
  source: /note="Description of Artificial Sequence: Synthetic polynucleotide"
gaggtgcagctggtgcagtctggggcagaggtgaaacagcccggggagtctctgaagatctcctgtaagggttctggatacagctttagcaactactggatcggctgggtgcgccagatgcccgggaaaggcctggagtggatggggatcatctatcctgatgactctgataccagatacagcccgtccttccaaggccaggtcaccatctcagccgacaggtccatcagcaccgcctacctgcagtggagcagcctgaaggcctcggacaccgccacgtattactgtgcgagaggaaatgttataaatggaaataccaatgcttttgatatctgggggcgggggaccacggtcaccgtctcgagt

SEQ ID NO: 301 - protein, 110 aa, Artificial Sequence
  source: /note="Description of Artificial Sequence: Synthetic polypeptide"
QAVVIQEPSFSVSPGGTVTLTCGLSSGSVSTGYYPSWYQQTPGQAPRTLIYNTNSRSSGVPDRFSGSILGNKAALTITGAQADDESDYYCVLYMGSGISVFGGGTKLTVL

SEQ ID NO: 302 - DNA, 330 bp, Artificial Sequence
  source: /note="Description of Artificial Sequence: Synthetic polynucleotide"
caggctgtggtgatccaggagccatcgttctcagtgtcccctggagggacagtcacactcacttgtggcttgagctctggctcagtctctactggttactaccccagctggtaccagcagaccccaggccaggctccacgcacgctcatctacaacacaaacagtcgctcttctggggtccctgatcgcttctctggctccatccttgggaacaaagctgccctcaccatcacgggggcccaggcagatgatgaatctgattattactgtgtgctgtatatgggtagtggcatttcggtattcggcggagggaccaagctgaccgtccta

SEQ ID NO: 303 - protein, 120 aa, Artificial Sequence
  source: /note="Description of Artificial Sequence: Synthetic polypeptide"
EVQLLESGGGLVQPGGSLRLSCAASGFTFSSYAMSWVRQAPGKGLEWVSAISGSGGSTYYADSVKGRFTISRDNSKNTLYLQMNSLRAEDTAVYYCAGGRVGSTAAFDTWGQGTMVTVSS

SEQ ID NO: 304 - DNA, 360 bp, Artificial Sequence
  source: /note="Description of Artificial Sequence: Synthetic polynucleotide"
gaggtgcagctgttggagtctgggggaggcttggtacagcctggggggtccctgagactctcctgtgcagcctctggattcacctttagcagctatgccatgagctgggtccgccaggctccagggaaggggctggagtgggtctcagctattagtggtagtggtggtagcacatactacgcagactccgtgaagggccggttcaccatctccagagacaattccaagaacacgctgtatctgcaaatgaacagcctgagagccgaggacacggccgtgtattactgtgcgggaggtagagtgggatctacggcggcttttgatacatggggccaggggacaatggtcaccgtctcgagt

SEQ ID NO: 305 - protein, 111 aa, Artificial Sequence
  source: /note="Description of Artificial Sequence: Synthetic polypeptide"
QSVLTQPPSVSGAPGQRVAISCTGSSSNIGAGYDVHWFQQLPGTAPKLLIFGNKNRPSGVPDRFSASKSGTAASLAITGLQAEDEGDYYCQSYDSSLSGVIFGRGTKLTVL

SEQ ID NO: 306 - DNA, 333 bp, Artificial Sequence
  source: /note="Description of Artificial Sequence: Synthetic polynucleotide"
cagtctgtgttaacgcagccgccctcagtgtctggggccccagggcagagggtcgccatatcctgtacggggagcagctccaatattggggcaggttatgatgtacactggtttcagcaacttccaggaacagcccccaaactcctcatctttggtaacaagaatcggccctcaggggtccccgaccgattctctgcctctaagtctggcaccgcagcctccctggccatcactgggctccaggctgaggatgagggtgattattactgccagtcctatgacagcagcctgagtggtgtgatcttcggcagagggaccaagctgaccgtccta

SEQ ID NO: 307 - protein, 120 aa, Artificial Sequence
  source: /note="Description of Artificial Sequence: Synthetic polypeptide"
EVQLLESGGGLVQPGGSLRLSCAASGFTFSSYAMSWVRQAPGKGLEWVSAISGSGGSTYSADSVKGRFTISRDNSKNTLYLQMNSLRAEDTAVYYCAGGRVGSTAAFDTWGRGTTVTVSS

SEQ ID NO: 308 - DNA, 360 bp, Artificial Sequence
  source: /note="Description of Artificial Sequence: Synthetic polynucleotide"
gaggtgcagctgttggagtctgggggaggcttggtacagcctggggggtccctgagactctcctgtgcagcctctggattcacctttagcagctatgccatgagctgggtccgccaggctccagggaaggggctggagtgggtctcagctattagtggtagtggtggtagcacatactccgcagactccgtgaagggccggttcaccatctccagagacaactccaagaacacgctgtatctgcaaatgaacagcctgagagccgaggacacggccgtgtattactgtgcgggaggtagagtgggatctacggcggcttttgatacatgggggcgagggaccacggtcaccgtctcgagt

SEQ ID NO: 309 - protein, 111 aa, Artificial Sequence
  source: /note="Description of Artificial Sequence: Synthetic polypeptide"
QAVLTQPSSVSGAPGQRVTISCTGSSSNIGAGYDVHWYQQLPGTAPKLLIYGNSNRPSGVPDRFSGSKSGTSASLAITGLQAEDEADYYCQSYDSSLRGYVFGTGTKLTVL

SEQ ID NO: 310 - DNA, 333 bp, Artificial Sequence
  source: /note="Description of Artificial Sequence: Synthetic polynucleotide"
caggctgtgctgactcagccgtcctcagtgtctggggccccagggcagagggtcaccatctcctgcactgggagcagctccaacatcggggcaggttatgatgtacactggtaccagcagcttccaggaacagcccccaaactcctcatctatggtaacagcaatcggccctcaggggtccctgaccgattctctggctccaagtctggcacctcagcctccctggccatcactgggctccaggctgaggatgaggctgattattactgccagtcctatgacagcagcctgcgtggttatgtcttcggaactgggaccaagctgaccgtccta

SEQ ID NO: 311 - protein, 122 aa, Artificial Sequence
  source: /note="Description of Artificial Sequence: Synthetic polypeptide"
EVQLLESGGGLVQPGGSLRLSCAASGFTFSSYAMSWVRQAPGKGLEWVSAISGSGGSTYYADSVKGRFTISRDNSKNTLYLQMNSLRAEDTAVYYCARGSRVGTIWGSLDDWGKGTMVTVSS

SEQ ID NO: 312 - DNA, 366 bp, Artificial Sequence
  source: /note="Description of Artificial Sequence: Synthetic polynucleotide"
gaggtgcagctgttggagtctgggggaggcttggtacagcctggggggtccctgagactctcctgtgcagcctctggattcacctttagcagctatgccatgagctgggtccgccaggctccagggaaggggctggagtgggtctcagctattagtggtagtggtggtagcacatactacgcagactccgtgaagggccggttcaccatctccagagacaattccaagaacacgctgtatctgcaaatgaacagcctgagagccgaggacacggccgtgtattactgtgcgagaggcagtagagtggggacgatttggggaagccttgacgactggggcaaagggacaatggtcaccgtctcgagt

SEQ ID NO: 313 - protein, 109 aa, Artificial Sequence
  source: /note="Description of Artificial Sequence: Synthetic polypeptide"
ETTLTQSPGTLSLSPGERATLSCRASQSSSSSYLAWYQQKPGQAPRLLIYAASSRATGVPDRFSGSGSGTDFTLTISRLEPEDFAVYYCQQYGSSRFTFGQGTRLEIKR

SEQ ID NO: 314 - DNA, 327 bp, Artificial Sequence
  source: /note="Description of Artificial Sequence: Synthetic polynucleotide"
gaaacgacactcacgcagtctccaggcaccctgtctttgtctccaggggaaagagccaccctctcctgcagggccagtcagagtagtagcagcagctacttagcctggtaccagcagaaacctggccaggctcccaggctcctcatctatgctgcatccagcagggccactggcgtcccagacaggttcagtggcagtgggtctgggacagacttcactctcaccatcagcagactggagcctgaagattttgcagtgtattactgtcagcagtatggtagctcacggttcaccttcggccaagggacacgactggagattaaacgt

SEQ ID NO: 315 - protein, 122 aa, Artificial Sequence
  source: /note="Description of Artificial Sequence: Synthetic polypeptide"
EVQLLESGGGLVQPGGSLRLSCAASGFTFSSYAMSWVRQAPGKGLEWVSAISGSGGSTYYADSVKGRFTISRDNSKNTLYLQMNSLRAEDTAVYYCGRGSRVGTIWGSLDFWGQGTMVTVSS

SEQ ID NO: 316 - DNA, 366 bp, Artificial Sequence
  source: /note="Description of Artificial Sequence: Synthetic polynucleotide"
gaggtgcagctgttggagtctgggggaggcttggtacagcctggggggtccctgagactctcctgtgcagcctctggattcacctttagcagctatgccatgagctgggtccgccaggctccagggaaggggctggagtgggtctcagctattagtggtagtggtggtagcacatactacgcagactccgtgaagggccggttcaccatctccagagacaattccaagaacacgctgtatctgcaaatgaacagcctgagagccgaggacacggccgtgtattactgtgggagaggcagcagagtggggacgatttggggaagccttgacttttggggccaagggacaatggtcaccgtctcgagt

SEQ ID NO: 317 - protein, 110 aa, Artificial Sequence
  source: /note="Description of Artificial Sequence: Synthetic polypeptide"
QSVLTQPPSVSAAPGQRVTISCSGKSSNIGGNSVAWYQQLPGTAPKVLIYDNDKRPSGVPDRFSGSKSGTSATLGITGLQTGDEADYYCGSWDSSLGVGMFGGGTKVTVL

SEQ ID NO: 318 - DNA, 330 bp, Artificial Sequence
  source: /note="Description of Artificial Sequence: Synthetic polynucleotide"
cagtctgtgctgacgcagccgccctcagtgtctgcggccccgggacagagggtcaccatctcctgctctggaaagagctccaacattggcggtaattctgtggcctggtaccagcaactcccgggaacagcccccaaagtcctcatttatgacaatgataagcgaccctcaggggttcctgaccgattctctggctccaagtctggcacgtcagccaccctgggcatcaccggactgcagactggggacgaggccgattattactgcggatcctgggatagcagcctgggtgttgggatgttcggcggagggaccaaggtcaccgtccta

SEQ ID NO: 319 - protein, 118 aa, Artificial Sequence
  source: /note="Description of Artificial Sequence: Synthetic polypeptide"
EVQLLESGGGLVQPGGSLRLSCAASGFTFSSYAMSWVRQAPGKGLEWVSAISGSGGSTYYADSVKGRFTISRDNSKNTLYLQMNSLRAEDTAVYYCARGYSGSSFDAWGQGTMVTVSS

SEQ ID NO: 320 - DNA, 354 bp, Artificial Sequence
  source: /note="Description of Artificial Sequence: Synthetic polynucleotide"
gaggtgcagctgttggagtctgggggaggcttggtacagcctggggggtccctgagactctcctgtgcagcctctggattcacctttagcagctatgccatgagctgggtccgccaggctccagggaaggggctggagtgggtctcagctattagtggtagtggtggtagcacatactacgcagactccgtgaagggccggttcaccatctccagagacaattccaagaacacgctgtatctgcaaatgaacagcctgagagccgaggacacggccgtgtattactgtgcgaggggctacagtggaagttcctttgacgcctggggccaagggacaatggtcaccgtctcgagt

SEQ ID NO: 321 - protein, 110 aa, Artificial Sequence
  source: /note="Description of Artificial Sequence: Synthetic polypeptide"
QSVLTQPPSASGTPGQRVTISCSGSSSNIGSKSVYWYQQLPGAAPKLLIYRNSQRPSGVPDRFSASKSGTSASLAISGLRSEDEADYYCAAWDGSLSGHFFGTGTKLTVL

SEQ ID NO: 322 - DNA, 330 bp, Artificial Sequence
  source: /note="Description of Artificial Sequence: Synthetic polynucleotide"
cagtctgtgttgacgcagccgccatcagcgtccgggacccccgggcagagggtcaccatctcttgttctggaagcagctccaatatcggaagtaagtctgtatactggtaccagcaactcccaggagcggcccccaaactcctcatctacaggaatagtcagcggccctcaggggtccctgaccgattctctgcctccaagtctggcacctctgcctccctggccatcagtgggctccggtccgaggatgaggctgactattactgtgcagcatgggatggcagcctgagtggacatttcttcggaactgggaccaagctgaccgtccta

SEQ ID NO: 323 - protein, 122 aa, Artificial Sequence
  source: /note="Description of Artificial Sequence: Synthetic polypeptide"
EVQLVQSGAEVKKPGESLKISCKGSGYSFTSYWIGWVRQMPGKGLEWMGIIYPGDSDTRYSPSFQGQVTISADKSISTAYLQWSSLKASDTAMFYCARLNDSSGYTTNFDYWGQGTLVTVSS

SEQ ID NO: 324 - DNA, 366 bp, Artificial Sequence
  source: /note="Description of Artificial Sequence: Synthetic polynucleotide"
gaggtgcagctggtgcagtctggggcagaggtgaaaaagcccggggagtctctgaagatctcctgtaagggctctggatacagctttaccagctattggatcggctgggtgcgccagatgcccgggaaaggcctggagtggatggggatcatctatcctggtgactctgataccagatacagcccgtccttccaaggccaggtcaccatctcagccgacaagtccatcagcaccgcctacctgcagtggagcagcctgaaggcctcggacaccgccatgttttactgtgcgagactcaatgatagtagtggttatacgactaactttgactactggggccaaggcaccctggtcaccgtctcgagt

SEQ ID NO: 325 - protein, 110 aa, Artificial Sequence
  source: /note="Description of Artificial Sequence: Synthetic polypeptide"
QAVVIQEPSFSVSPGGTVTLTCGLSSGSVSTRYNPSWYQQTPGQAPRTLIYSTNTRSSGVPDRFSGSILGNKAALTITGAQADDESDYYCALYMGSGIWVFGGGTKLTVL

SEQ ID NO: 326 - DNA, 330 bp, Artificial Sequence
  source: /note="Description of Artificial Sequence: Synthetic polynucleotide"
caggctgtggtgatccaggagccatcgttctcagtgtcccctggagggacagtcacactcacttgtggcttgagctctggctcagtctctactcgttacaaccccagctggtaccagcagaccccaggccaggctccacgcacgctcatctacagtacaaacactcgttcttctggggtccctgaccgcttctctggctccatccttgggaacaaagctgccctcaccatcacgggggcccaggcagatgatgaatctgattattactgtgcgctgtatatgggtagtggcatttgggtgttcggcggagggaccaagctgaccgtccta

SEQ ID NO: 327 - protein, 119 aa, Artificial Sequence
  source: /note="Description of Artificial Sequence: Synthetic polypeptide"
EVQLVESGGGLVQPGGSLRLSCAASGFTFDSYAMSWVRQAPGKGLEWVSIISGRDGYTYYTDSVKGRFTISRDNSKNTVYLQMNSLRAEDTGVYYCARNGEWPGILDYWGRGTMVTVSS

SEQ ID NO: 328 - DNA, 357 bp, Artificial Sequence
  source: /note="Description of Artificial Sequence: Synthetic polynucleotide"
gaggtgcagctggtggagtctgggggaggcttggtacagcctggggggtccctgagactctcctgtgctgcctctggattcacctttgacagctatgccatgagctgggtccgccaggctccagggaaggggctggagtgggtctcaattattagtggtagagatggttacacatactacacagactccgtgaagggtcggttcaccatctccagagacaattccaagaacacggtgtatctgcaaatgaacagcctgagagccgaggacacgggtgtgtattattgtgcgagaaatggggagtggcccggaatcttagactactggggcagggggacaatggtcaccgtctcctca

SEQ ID NO: 329 - protein, 108 aa, Artificial Sequence
  source: /note="Description of Artificial Sequence: Synthetic polypeptide"
DIQMTQSPSTLSASIGDRVTITCRASEGIYHWLAWYQQKPGKAPKLLIYKASSLASGAPSRFSGSGSGTDFTLTISSLQPDDFATYYCQQYSNYPLTFGGGTKLEIKR

SEQ ID NO: 330 - DNA, 324 bp, Artificial Sequence
  source: /note="Description of Artificial Sequence: Synthetic polynucleotide"
gacatccagatgacccagtctccttccaccctgtctgcatctattggagacagagtcaccatcacctgccgggccagtgagggtatttatcactggttggcctggtatcagcagaagccagggaaagcccctaaactcctgatctataaggcctctagtttagccagtggggccccatcaaggttcagcggcagtggatctgggacagatttcactctcaccatcagcagcctgcagcctgatgattttgcaacttattactgccaacaatatagtaattatccgctcactttcggcggagggaccaagctggagatcaaacgt

SEQ ID NO: 331 - protein, 118 aa, Artificial Sequence
  source: /note="Description of Artificial Sequence: Synthetic polypeptide"
EVQLLESGGGLVQPGGSLRLSCAASGFTFSSYAMSWVRQAPGKGLEWVSAISGSGGSTYYADSVKGRFTISRDNSKNTLYLQMNSLRAEDTAVYYCAASNSYYYFDYWGQGTLVTVSS

SEQ ID NO: 332 - DNA, 354 bp, Artificial Sequence
  source: /note="Description of Artificial Sequence: Synthetic polynucleotide"
gaggtgcagctgttggagtctgggggaggcttggtacagcctggggggtccctgagactctcctgtgcagcctctggattcacctttagcagctatgccatgagctgggtccgccaggctccagggaaggggctggagtgggtctcagctattagtggtagtggtggtagcacatactacgcagactccgtgaagggccggttcaccatctccagagacaattccaagaacacgctgtatctgcaaatgaacagcctgagagccgaggacacggccgtgtattactgtgcggcgagtaatagttattactactttgactactggggccagggaaccctggtcaccgtctcgagt

SEQ ID NO: 333 - protein, 110 aa, Artificial Sequence
  source: /note="Description of Artificial Sequence: Synthetic polypeptide"
SSELTQDPAVSVALGQTVRITCQGDSLRNFYPSWYQQKPGQAPVLVIYGKNIRPSGIPDRFSGSGSGSTASLTITGAQAEDEADYYCNSRDSSGKHMGVVFGGGTKLTVL

SEQ ID NO: 334 - DNA, 330 bp, Artificial Sequence
  source: /note="Description of Artificial Sequence: Synthetic polynucleotide"
tcttctgagctgactcaggaccctgctgtgtctgtggccttgggacagacagtcaggatcacatgccaaggagacagcctcagaaacttttatccaagttggtatcagcagaagccaggacaggcccctgttcttgtcatttatggtaaaaatattcggccctcagggatcccagaccgattctctggctccggctcaggaagcacagcttccttgaccatcactggggctcaggcggaagatgaggctgactattactgtaactcccgggacagcagtggtaaacatatgggggtggtattcggcggagggaccaagctgaccgtccta

SEQ ID NO: 335 - protein, 120 aa, Artificial Sequence
  source: /note="Description of Artificial Sequence: Synthetic polypeptide"
EVQLLESGGGLVQPGGSLRLSCAASGFTFSSYAMSWVRQAPGKGLEWVSAISGSGGSTYYADSVKGRFTISRDNSKNTLYLQMNSLRAEDMAVYYCARTPGYSSGWYSVWGRGTLVTVSS

SEQ ID NO: 336 - DNA, 360 bp, Artificial Sequence
  source: /note="Description of Artificial Sequence: Synthetic polynucleotide"
gaggtgcagctgttggagtctgggggaggcttggtacagcctggggggtccctgagactctcctgtgcagcctctggattcacctttagcagctatgccatgagctgggtccgccaggctccagggaaggggctggagtgggtctcagctattagtggtagtggtggtagcacatactacgcagactccgtgaagggccggttcaccatctccagagacaattccaagaacacgctgtatctgcaaatgaacagcctgagagccgaggacatggccgtgtattactgtgcgaggactcccgggtatagcagtggctggtactcggtttggggccggggcaccctggtcaccgtctcgagt

SEQ ID NO: 337 - protein, 111 aa, Artificial Sequence
  source: /note="Description of Artificial Sequence: Synthetic polypeptide"
QSVVTQPPSVSGAPGQRVTISCTGSSSNIGAGYDVHWYQQVPGTAPKLLIYGNNNRPSGVPDRFSGSKSGTSASLAITGLQPEDEVDYYCQSYDRSLSGYIFGSGTKVTVL

SEQ ID NO: 338 - DNA, 333 bp, Artificial Sequence
  source: /note="Description of Artificial Sequence: Synthetic polynucleotide"
cagtctgtcgtgacgcagccgccctcagtgtctggggccccagggcagagggtcaccatctcctgtactgggagcagctccaacatcggggcagggtatgatgttcactggtaccagcaggttccaggaacagcccccaaactcctcatctatggtaacaacaatcggccctcgggggtccctgaccgattctctggctccaagtctggcacctcagcctccctggccatcactgggctccagcctgaggatgaagttgattattactgccagtcctatgaccgcagcctgagtggttatatcttcggaagtgggaccaaggtcaccgtccta

SEQ ID NO: 339 - protein, 128 aa, Artificial Sequence
  source: /note="Description of Artificial Sequence: Synthetic polypeptide"
EVQLLESGGGLVQPGGSLRLSCAASGFTFSSYAMSWVRQAPGKGLEWVSAISGSGGSTYYADSVKGRFTISRDNSKNTLYLQMNSLRAEDTAVYYCARVGSFGDYKDKSGYGFYFDYWGQGTLVTVSS

SEQ ID NO: 340 - DNA, 384 bp, Artificial Sequence
  source: /note="Description of Artificial Sequence: Synthetic polynucleotide"
gaggtgcagctgttggagtctgggggaggcttggtacagcctggggggtccctgagactctcctgtgcagcctctggattcacctttagcagctatgccatgagctgggtccgccaggctccagggaaggggctggagtgggtctcagctattagtggtagtggtggtagcacatactacgcagactccgtgaagggccggttcaccatctccagagacaattccaagaacacgctgtatctgcaaatgaacagcctgagagccgaggacacggccgtgtattactgtgcgagagttgggtcgtttggtgattacaaagataaaagtggttacggcttctactttgactactggggccaaggcaccctggtcaccgtctcgagt

SEQ ID NO: 341 - protein, 110 aa, Artificial Sequence
  source: /note="Description of Artificial Sequence: Synthetic polypeptide"
QSVLTQPPSASGTLGQTVFISCSGSSSNIGSNSVSWYQQLPGTAPKFLIYHNNQRPSGVPERFSGSKSGTSASLAIRGLQSEDEADYYCASWEDSLNGWVFGGGTKLTVL

SEQ ID NO: 342 - DNA, 330 bp, Artificial Sequence
  source: /note="Description of Artificial Sequence: Synthetic polynucleotide"
cagtctgtgctgactcagccaccctcggcgtctgggaccctcgggcagacggtcttcatctcttgttctggaagcagttccaacatcggaagtaattctgtgagttggtaccagcagctcccaggaacggcccccaaatttctcatttatcataataatcagcggccctcaggggtccctgagcgattctctggctccaagtctggcacctcagcctccctggccatccgtgggctccagtctgaggatgaggctgattactactgtgcatcttgggaggacagcctgaatggttgggtgttcggcggggggaccaagctgaccgtccta

SEQ ID NO: 343 - protein, 127 aa, Artificial Sequence
  source: /note="Description of Artificial Sequence: Synthetic polypeptide"
QVQLVQSGAEVKKPGASVKVSCKASGYTFTSYGISWVRQAPGQGLEWMGWISAYNGNTNYAQKLQGRVTMTTDTSTSTAYMELRSLRSDDTAVYYCARVGSGYCSGGSCYVGWFDPWGRGTMVTVSS

SEQ ID NO: 344 - DNA, 381 bp, Artificial Sequence
  source: /note="Description of Artificial Sequence: Synthetic polynucleotide"
caggtccagctggtgcagtctggggctgaggtgaagaagcctggggcctcagtgaaggtctcctgcaaggcttctggttacacctttaccagctatggtatcagctgggtgcgacaggcccctggacaagggcttgagtggatgggatggatcagcgcttacaatggtaacacaaactatgcacagaagctccagggcagagtcaccatgaccacagacacatccacgagcacagcctacatggagctgaggagcctgagatctgacgacacggccgtgtattactgtgcgagagtggggtcgggatattgtagtggtggtagctgctacgtgggctggttcgacccctggggccgggggacaatggtcaccgtctcgagt

SEQ ID NO: 345 - protein, 109 aa, Artificial Sequence
  source: /note="Description of Artificial Sequence: Synthetic polypeptide"
SSELTQDPAVSVALGQTVKITCQGDSLSAYYATWYQQKPGQAPVLVIYGKNKRPSGIPDRFSGSKSGNTASLTITGAQAEDEADYYCNSRDSSGNDHYVFGTGTKLTVL

SEQ ID NO: 346 - DNA, 327 bp, Artificial Sequence
  source: /note="Description of Artificial Sequence: Synthetic polynucleotide"
tcttctgagctgactcaggaccctgctgtgtctgtggccttgggacagacagtcaagatcacatgccaaggagacagcctcagtgcctattatgcaacctggtaccagcagaagccaggccaggcccctgtacttgtcatctatggtaaaaacaagcggccgtccgggatcccagaccgattctctggctccaagtcaggaaacacagcttccttgaccatcacgggggctcaggcggaagatgaggctgactattactgtaactcccgggacagcagtggtaatgatcattatgtcttcggaactgggaccaagctgaccgttcta

SEQ ID NO: 347 - protein, 122 aa, Artificial Sequence
  source: /note="Description of Artificial Sequence: Synthetic polypeptide"
EVQLVQSGAEVRKPGASVKVSCRASGYNFKDYYLHWVRQAPGEGLEWMGWINPHAGTTKYAQNFQHRIIMTRDTTITTAYMELSSLKSDDTAIYFCTRYYFDSSGYFRFDPWGQGTMVTVSS

SEQ ID NO: 348 - DNA, 366 bp, Artificial Sequence
  source: /note="Description of Artificial Sequence: Synthetic polynucleotide"
gaggtccagctggtacagtctggggctgaggtgaggaagcctggggcctcagtcaaggtctcctgcagggcttctggatacaacttcaaagactactatttgcactgggtgcgccaggcccctggagaagggcttgagtggatggggtggatcaaccctcacgctggtaccacaaaatatgcacagaattttcagcacaggattattatgaccagggacacgaccatcaccacagcctacatggaactgagcagtctgaaatctgacgacacagccatttatttctgtaccagatactactttgacagtagtggttattttaggttcgacccctggggccaagggacaatggtcaccgtctcgagt

SEQ ID NO: 349 - protein, 110 aa, Artificial Sequence
  source: /note="Description of Artificial Sequence: Synthetic polypeptide"
QSVVTQPPSVSGAPGQKVTISCSGSSSNIGNNYVSWYQQLPGTAPKLLIYDNNKRPSGIPDRFSGSKSGTSATLGITGLQTGDEADYYCGTWDSSLSAGVFGGGTKVTVL

SEQ ID NO: 350 - DNA, 330 bp, Artificial Sequence
  source: /note="Description of Artificial Sequence: Synthetic polynucleotide"
cagtctgtcgtgacgcagccgccctcagtgtctggggccccaggacagaaggtcaccatctcctgctctggaagcagctccaacattgggaataattatgtatcctggtaccagcagctcccaggaacagcccccaaactcctcatttatgacaataataagcgaccctcagggattcctgaccgattctctggctccaagtctggcacgtcagccaccctgggcatcaccggactccagactggggacgaggccgattattactgcggaacatgggatagcagcctgagtgctggggtgttcggcggagggaccaaggtcaccgtccta

SEQ ID NO: 351 - protein, 118 aa, Artificial Sequence
  source: /note="Description of Artificial Sequence: Synthetic polypeptide"
QMQLVQSGAEVKKPGESLKMSCKGSGYSFTSYWIGWVRQMPGKGLEWMGIIYPGNSDTRYNPSFEGQVTISADKSINTAFLQWNSLKASDTAIYYCARAPWVGAFDTWGQGTMVTVSS

SEQ ID NO: 352 - DNA, 354 bp, Artificial Sequence
  source: /note="Description of Artificial Sequence: Synthetic polynucleotide"
cagatgcagctggtgcagtctggggcagaggtgaaaaagcccggggagtctctgaagatgtcctgtaagggttctggatacagctttaccagctactggatcggctgggtgcgccagatgcccgggaaaggcctggagtggatggggatcatctatcctggtaactccgataccagatacaacccgtccttcgaaggccaggtcaccatctcagccgacaagtccatcaacaccgccttcctgcagtggaacagcctgaaggcctcggacaccgccatatattattgtgcgcgggctccctgggtgggtgcttttgatacttggggccaggggacaatggtcaccgtctcttca

SEQ ID NO: 353 - protein, 108 aa, Artificial Sequence
  source: /note="Description of Artificial Sequence: Synthetic polypeptide"
DIVMTQSPSTLSASVGDRVTITCRASQGISSWLAWYQQKPGRAPKVLIYKASTLESGVPSRFSGSGSGTDFTLTISSLQPEDFATYYCQQSYSTPWTFGQGTKLEIKR

SEQ ID NO: 354 - DNA, 324 bp, Artificial Sequence
  source: /note="Description of Artificial Sequence: Synthetic polynucleotide"
gacatcgtgatgacccagtctccttccaccctgtctgcatctgtaggagacagagtcaccatcacttgccgggccagtcagggtattagtagctggttggcctggtatcagcagaaaccagggagagcccctaaggtcttgatctataaggcatctactttagaaagtggggtcccatcaaggttcagcggcagtggatctgggacagatttcactctcaccatcagcagtctgcaacctgaagattttgcaacttactactgtcaacagagttacagtaccccgtggacgttcggccaagggaccaagctggagatcaaacgt

SEQ ID NO: 355 - protein, 121 aa, Artificial Sequence
  source: /note="Description of Artificial Sequence: Synthetic polypeptide"
QMQLVQSGAEVKKPGASVKVSCKSSGYTFKDYYINWVRQAPGQGLEWVGWINPKNGITKYSQNFQGRVSMTTDTSISTVYMDLRGLTSDDTAVYYCARDANRLRVGWFDPWGQGTLVTVSS

SEQ ID NO: 356 - DNA, 363 bp, Artificial Sequence
  source: /note="Description of Artificial Sequence: Synthetic polynucleotide"
cagatgcagctggtgcagtctggggctgaggtgaagaagccaggggcctcagtgaaagtctcctgcaagtcttctggatacaccttcaaggactactatatcaactgggtgcgacaggcccctggacaagggcttgagtgggtgggatggatcaaccctaaaaatggtatcacaaaatattcgcagaattttcagggcagggtctccatgaccacggatacgtccatcagcacagtctacatggacctgagaggtctgacatctgacgacacggccgtttattattgtgcgagagacgcgaaccgccttagggtgggctggttcgacccctggggccaaggaaccctggtcaccgtctcgagt

SEQ ID NO: 357 - protein, 111 aa, Artificial Sequence
  source: /note="Description of Artificial Sequence: Synthetic polypeptide"
QAVLTQPSSVSGSPGQRVSISCTGSSSNIGAGYDVHWYQQLPGTAPKLLIYGNINRPSGVPDRFSGSKSGTSASLAITGLQAEDEADYYCQSYDSSLRAAVFGGGTKVTVL

SEQ ID NO: 358 - DNA, 333 bp, Artificial Sequence
  source: /note="Description of Artificial Sequence: Synthetic polynucleotide"
caggctgtgctgactcagccgtcctcagtgtctgggtccccagggcagagggtcagcatctcctgcactgggagcagctccaacatcggggcaggttatgatgtacattggtatcaacaacttccaggaacagcccccaaactcctcatctacggtaacatcaatcggccctcaggggtccctgaccgattctctggctccaagtctggcacctcagcctccctggccatcactgggctccaggctgaagatgaggctgattattactgccagtcctatgacagcagcctgagggctgcggtattcggcggagggaccaaggtcaccgtccta

SEQ ID NO: 359 - protein, 122 aa, Artificial Sequence
  source: /note="Description of Artificial Sequence: Synthetic polypeptide"
EVQLLESGGGLVQPGGSLRLSCAASGFTFSSYAMSWVRQAPGKGLEWVSAISGSGGSTYYADSVKGRFTISRDNSKNTLYLQMNSLRAEDTAVYYCAKDFWFGLPPSFFDSWGQGTMVTVSS

SEQ ID NO: 360 - DNA, 366 bp, Artificial Sequence
  source: /note="Description of Artificial Sequence: Synthetic polynucleotide"
gaggtgcagctgttggagtctgggggaggcttggtacagcctggggggtccctgagactctcctgtgcagcctctggattcacctttagcagctatgccatgagctgggtccgccaggctccagggaaggggctggagtgggtctcagctattagtggtagtggtggtagcacatactacgcagactccgtgaagggccggttcaccatctccagagacaattccaagaacacgctgtatctgcaaatgaacagcctgagagccgaggacacggccgtgtattactgtgcgaaagatttctggtttggactaccaccttccttctttgactcttggggccaagggacaatggtcaccgtctcgagt

SEQ ID NO: 361 - protein, 106 aa, Artificial Sequence
  source: /note="Description of Artificial Sequence: Synthetic polypeptide"
QSVLTQPPSVSVSPGQKASITCSGERMGDKYAAWYQQKPGQSPILVIYQDTKRPSGIPERFSGSNSGNTATLTISGTQDMDEADYYCQVWDSSTGVFGGGTKVTVL

SEQ ID NO: 362 - DNA, 318 bp, Artificial Sequence
  source: /note="Description of Artificial Sequence: Synthetic polynucleotide"
cagtctgtgctgactcagccaccctcagtgtccgtgtccccaggacagaaggccagcatcacctgctctggagaaagaatgggggataaatatgctgcctggtatcagcagaagccaggccagtcacctatactggtcatctatcaagatacaaagcggccctcagggatccctgagcgattctctggctccaactctgggaacacagccacgttgaccatcagcgggacccaggacatggatgaggctgactattactgtcaggtgtgggacagcagcactggggtattcggcggagggaccaaggtcaccgtccta

SEQ ID NO: 363 - protein, 123 aa, Artificial Sequence
  source: /note="Description of Artificial Sequence: Synthetic polypeptide"
EVQLLESGGGLVQPGGSLRLSCAASGFTFSSYAMSWVRQAPGKGLEWVSAISGSGGSTYYADSVKGRFTISRDNSKNTLYLQMNSLRAEDTAVYYCAKDLNPYSVVTLGMDVWGRGTMVTVSS

SEQ ID NO: 364 - DNA, 369 bp, Artificial Sequence
  source: /note="Description of Artificial Sequence: Synthetic polynucleotide"
gaggtgcagctgttggagtctgggggaggcttggtacagcctggggggtccctgagactctcctgtgcagcctctggattcacctttagcagctatgccatgagctgggtccgccaggctccagggaaggggctggagtgggtctcagctattagtggtagtggtggtagcacatactacgcagactccgtgaagggccggttcaccatctccagagacaattccaagaacacgctgtatctgcaaatgaacagcctgagagccgaggacacggccgtgtattactgtgcgaaagatctgaacccttattcagtggtaactctcggtatggacgtctggggcagagggacaatggtcaccgtctcgagt

SEQ ID NO: 365 - protein, 108 aa, Artificial Sequence
  source: /note="Description of Artificial Sequence: Synthetic polypeptide"
QSVLTQPPSVSVAPGQAARIPCGGDNIGSKSVHWYQQRPGQAPVLVVFDDSDRPSGIPERFSGSNSGHTATLTINRVEPGDEAEYYCEVWDGGERHVVFGGGTKLTVL

SEQ ID NO: 366 - DNA, 324 bp, Artificial Sequence
  source: /note="Description of Artificial Sequence: Synthetic polynucleotide"
cagtctgtgctgactcagccaccctcggtgtcagtggccccaggacaggcggccaggattccctgtgggggagacaacattggaagtaagagtgttcactggtaccagcagaggccaggccaggcccctgtcctggtcgtctttgatgatagtgaccggccctcagggatccctgagcgattctctggctccaattctgggcacacggccaccctgaccatcaacagggtcgaacccggggatgaggccgagtattattgtgaggtgtgggatggtggcgagagacatgtggtattcggcggagggaccaagctgaccgtccta

SEQ ID NO: 367 - protein, 121 aa, Artificial Sequence
  source: /note="Description of Artificial Sequence: Synthetic polypeptide"
EVQLLESGGGLVQPGGSLRLSCAASGFTFSSYAMSWVRQAPGKGLEWVSAISGSGGSTYYADSVKGRFTISRDNSKNTLYLQMNSLRAEDTAVYYCARDLTGPNHWFFDLWGRGTTVTVSS

SEQ ID NO: 368 - DNA, 363 bp, Artificial Sequence
  source: /note="Description of Artificial Sequence: Synthetic polynucleotide"
gaggtgcagctgttggagtctgggggaggcttggtacagcctggggggtccctgagactctcctgtgcagcctctggattcacctttagcagctatgccatgagctgggtccgccaggctccagggaaggggctggagtgggtctcagctattagtggtagtggtggtagcacatactacgcagactccgtgaagggccggttcaccatctccagagacaattccaagaacacgctgtatctgcaaatgaacagcctgagagccgaggacacggccgtgtattactgtgccagagatttaactggcccaaaccactggttcttcgatctctgggggcgggggaccacggtcaccgtctcgagt

SEQ ID NO: 369 - protein, 106 aa, Artificial Sequence
  source: /note="Description of Artificial Sequence: Synthetic polypeptide"
QSVLTQPPSVSVSPGQTASISCSGHRLGDKYVSWYRQRPGQSPVLVIYQDEKRYSGISERFSGSNSGNVATLTITGTQAMDEADYHCQAWDSTTVVFGGGTKLTVL

SEQ ID NO: 370 - DNA, 318 bp, Artificial Sequence
  source: /note="Description of Artificial Sequence: Synthetic polynucleotide"
cagtctgtgctgactcagccaccctccgtgtccgtgtccccaggacagacagccagcatctcctgctctggacatagattgggcgataagtatgttagttggtatcggcagaggccgggccagtcccctgtgctggtcatctatcaagatgagaagaggtactcagggatctctgagcgattctctggctccaactctgggaacgtagccactctgaccatcaccgggacccaggctatggatgaggctgactatcactgtcaggcgtgggacagcaccactgtggtgttcggcggagggaccaagctgaccgtccta

SEQ ID NO: 371 - protein, 120 aa, Artificial Sequence
  source: /note="Description of Artificial Sequence: Synthetic polypeptide"
EVQLLESGGGLVQPGGSLRLSCAASGFTFSSYAMSWVRQAPGKGLEWVSAISGSGGSTYYADSVKGRFTISRDNSKNTLYLQMNSLRAEDTAVYYCARDRRPRDDAFDMWGRGTTVTVSS

SEQ ID NO: 372 - DNA, 360 bp, Artificial Sequence
  source: /note="Description of Artificial Sequence: Synthetic polynucleotide"
gaggtgcagctgttggagtctgggggaggcttggtacagcctggggggtccctgagactctcctgtgcagcctctggattcacctttagcagctatgccatgagctgggtccgccaggctccagggaaggggctggagtgggtctcagctattagtggtagtggtggtagcacatactacgcagactccgtgaagggccggttcaccatctccagagacaattccaagaacacgctgtatctgcaaatgaacagcctgagagccgaggacacggccgtgtattactgtgcgagagatagacggccgagggatgatgcttttgatatgtgggggagagggaccacggtcaccgtctcgagt

SEQ ID NO: 373 - protein, 108 aa, Artificial Sequence
  source: /note="Description of Artificial Sequence: Synthetic polypeptide"
DIQMTQSPSSVSASVGDRVSITCRASQGIGSWLFWYQQKPGKAPILLMSAVSGLQSGVPSRFSGSGSGTDFTLTISSVQPEDFATYYCQQAHSFPITFGQGTRLEIKR

SEQ ID NO: 374 - DNA, 324 bp, Artificial Sequence
  source: /note="Description of Artificial Sequence: Synthetic polynucleotide"
gacatccagatgacccagtctccctcttctgtgtctgcttctgttggagacagagtcagcatcacttgtcgggcgagtcagggaattggcagctggttattctggtatcagcagaaaccagggaaagcccctatcctcctgatgtccgctgtgtccggtttgcaaagtggagtcccatcacgattcagcggcagcggatctgggacagatttcactctcacgatcagcagcgtacagcctgaggattttgcaacttactattgtcaacaggctcacagtttccctatcaccttcggccaagggacacgactggagattaaacgt

SEQ ID NO: 375 - protein, 126 aa, Artificial Sequence
  source: /note="Description of Artificial Sequence: Synthetic polypeptide"
EVQLLESGGGLVQPGGSLRLSCAASGFTFSSYAMSWVRQAPGKGLEWVSAISGSGGSTYYADSVKGRFTISRDNSKNTLYLQMNSLRAEDTAVYYCARDRVSNWNYYGQDSYFDYWGQGTMVTVSS

SEQ ID NO: 376 - DNA, 378 bp, Artificial Sequence
  source: /note="Description of Artificial Sequence: Synthetic polynucleotide"
gaggtgcagctgttggagtctgggggaggcttggtacagcctggggggtccctgagactctcctgtgcagcctctggattcacctttagcagctatgccatgagctgggtccgccaggctccagggaaggggctggagtgggtctcagctattagtggtagtggtggtagcacatactacgcagactccgtgaagggccggttcaccatctccagagacaattccaagaacacgctgtatctgcaaatgaacagcctgagagccgaggacacggccgtgtattactgtgcgagggacagggtctctaactggaactactacggccaggacagctactttgactactggggccaggggacaatggtcaccgtctcgagt

SEQ ID NO: 377 - protein, 110 aa, Artificial Sequence
  source: /note="Description of Artificial Sequence: Synthetic polypeptide"
QSVLTQPPSASGAPGQRVTISCSGTNSNIGSNNVNWYQQLPGKAPRLLIYNNNQRPSGVPDRFSGSKSGTSASLAISGLQSELEADYYCSAWDDSLHGPVFGGGTKLTVL

SEQ ID NO: 378 - DNA, 330 bp, Artificial Sequence
  source: /note="Description of Artificial Sequence: Synthetic polynucleotide"
cagtctgtgctgactcagccaccctccgcgtctggggcccccgggcagagggtcaccatttcttgttctgggaccaactccaacatcggaagtaataatgtaaactggtatcagcaactcccaggaaaggcccccagactcctcatctacaataataatcagaggccctcaggggtccctgaccgattctctggctccaagtctggcacctcagcctccctggccatcagtgggctccagtctgagcttgaggctgattattattgttcagcatgggatgacagcctgcatggtccggtgttcggcggagggaccaagctgaccgtccta

SEQ ID NO: 379 - protein, 123 aa, Artificial Sequence
  source: /note="Description of Artificial Sequence: Synthetic polypeptide"
EVQLVESGGGLAQPGGSLRLSCAASGLTFTTYAMSWVRQAPGKGLEWVSSISGSGHSTYYADSVKGRFTISRDISKNTLYLQMNSLRAEDTAVYYCAKDSSAFGFVHGAFDIWGQGTLVTVSS

SEQ ID NO: 380 - DNA, 369 bp, Artificial Sequence
  source: /note="Description of Artificial Sequence: Synthetic polynucleotide"
gaggtgcagctggtggagtctgggggaggcttggcacagcctggggggtccctgagactctcctgtgcagcctctggattaacctttaccacctatgccatgagctgggtccgccaggctccagggaaggggctggagtgggtctcaagtattagtggaagtggtcatagcacatattacgcagactccgtgaagggccgcttcaccatctccagagacatttccaagaacacgttgtatctgcaaatgaacagcctcagagccgaggacacggccgtctattactgtgcgaaagattcgtcggcttttgggtttgtacacggtgcttttgatatctggggccagggaaccctggtcaccgtctcgagt

SEQ ID NO: 381 - protein, 107 aa, Artificial Sequence
  source: /note="Description of Artificial Sequence: Synthetic polypeptide"
SSELTQDPAASVALGQTVSITCQGDSLRNYWASWYQQKPGQAPVLVIYGKNTRPSGIPDRFSGSTSGNTASLTITGAQAEDEADYYCNSRDSGHRLLFGGGTKLTVL

SEQ ID NO: 382 - DNA, 321 bp, Artificial Sequence
  source: /note="Description of Artificial Sequence: Synthetic polynucleotide"
tcttctgagctgactcaggaccctgctgcgtctgtggccttgggacagacagtcagcatcacatgccaaggagacagcctcagaaactattgggctagctggtaccagcagaagccaggacaggcccctgtacttgtcatctatggtaaaaatacccggccctcagggatcccagaccgattctctggctccacctcaggaaacacagcttccttgaccatcactggggctcaggcggaggatgaggctgactattactgcaactcccgggacagtggtcaccgtcttcttttcggcggagggaccaagctgaccgtccta

SEQ ID NO: 383 - protein, 122 aa, Artificial Sequence
  source: /note="Description of Artificial Sequence: Synthetic polypeptide"
EVQLVQSGAEVKRPGESLKISCRASGYIFTNNWVAWVRQQPGKGLEWMGIIYPGDSDTRYSPSFQGQVTFSADTSINTAYLQWNSLKASDTATYFCAREAYNSYEYYGMDVWGRGTTVTVSS

SEQ ID NO: 384 - DNA, 366 bp, Artificial Sequence
  source: /note="Description of Artificial Sequence: Synthetic polynucleotide"
gaggtgcagctggtgcagtctggggcagaagtcaagaggcccggagagtctctgaagatctcctgtagggcctctggatacatctttacgaacaattgggtcgcctgggtgcgccagcagcccgggaaaggcctggagtggatggggatcatctatcctggtgactctgacaccagatacagcccgtccttccaaggccaggtcactttctcggccgacacgtccatcaacaccgcctacctacagtggaatagcctgaaggcctcggacaccgccacttacttctgtgcgcgagaggcctacaactcatacgaatattacggtatggacgtctgggggcgagggaccacggtcaccgtctcgagt

SEQ ID NO: 385 - protein, 110 aa, Artificial Sequence
  source: /note="Description of Artificial Sequence: Synthetic polypeptide"
QTVVIQEPSFSVSPGGTVTLTCGLSSGSVSTNYYPSWYQQTPGQAPRTLIYNTNTRSSGVPDRFSGSILGNKAALTITGAQADDESDYYCVLYMGSGISVFGGGTKVTVL

SEQ ID NO: 386 - DNA, 330 bp, Artificial Sequence
  source: /note="Description of Artificial Sequence: Synthetic polynucleotide"
cagactgtggtgatccaggagccatcgttctcagtgtcccctggagggacagtcacactcacttgtggcttgagctctggctcagtctctactaattactaccccagctggtaccagcagaccccaggccaggctccacgcacgctcatctacaacacaaacactcgctcttctggggtccctgatcgcttctctggctccatccttgggaacaaagctgccctcaccatcacgggggcccaggcagatgatgaatctgattattactgtgtgctgtatatgggtagtggcatttcggtgttcggcggagggaccaaggtcaccgtccta

SEQ ID NO: 387 - protein, 122 aa, Artificial Sequence
  source: /note="Description of Artificial Sequence: Synthetic polypeptide"
EVQLVESGAEVKKPGESLKISCKASGYIFTNNWIAWVRQQPGKGLEWMGIIYPGDSDTRYSPSFQGRVTFSADTSINTAYLQWSSLKASDTATYYCAREAYNSYEYYGMDVWGQGTMVTVSS

SEQ ID NO: 388 - DNA, 366 bp, Artificial Sequence
  source: /note="Description of Artificial Sequence: Synthetic polynucleotide"
gaggtgcagctggtggagtccggagcagaagtcaaaaagcccggagagtctctgaagatctcctgtaaggcttctggatacatctttacgaacaattggatcgcctgggtgcggcagcagcccgggaaaggcctggagtggatgggaatcatctatcctggtgactctgacaccagatacagcccgtccttccagggccgggtcactttctcagccgacacgtccatcaacaccgcctacctccagtggagtagcctgaaggcctcggacaccgccacttactactgtgcgagagaggcctacaactcatacgagtactacggtatggacgtctggggccaagggacaatggtcaccgtctcgagt

SEQ ID NO: 389 - protein, 110 aa, Artificial Sequence
  source: /note="Description of Artificial Sequence: Synthetic polypeptide"
QTVVLQEPAFSVSPGGTVTLTCGLSSGSVSTSYYPSWYQQTPGQPPRTLIYNTNTRSSGVSDRFSGSILGNKAALTITGAQAEDESDYYCVLYMGSGISVFGGGTKLTVL

SEQ ID NO: 390 - DNA, 330 bp, Artificial Sequence
  source: /note="Description of Artificial Sequence: Synthetic polynucleotide"
cagactgtggtgctccaggagccagcgttctcagtgtcccctggagggacagtcacactcacctgtggcttgagctctggctcagtctctactagttactaccccagttggtaccagcagaccccaggccagcctccacgcacgctcatctacaacacaaacacccgctcttctggggtctctgatcgcttctctggctccatccttgggaacaaagctgccctcaccatcacgggggcccaggccgaagatgaatctgattattactgtgttctgtatatgggtagtggcatttcggtattcggcggggggaccaagctgaccgtccta

SEQ ID NO: 391 - protein, 124 aa, Artificial Sequence; identical to SEQ ID NO: 41
  source: /note="Description of Artificial Sequence: Synthetic polypeptide"

SEQ ID NO: 392 - DNA, 372 bp, Artificial Sequence; identical to SEQ ID NO: 136
  source: /note="Description of Artificial Sequence: Synthetic polynucleotide"

SEQ ID NO: 393 - protein, 109 aa, Artificial Sequence; identical to SEQ ID NO: 85
  source: /note="Description of Artificial Sequence: Synthetic polypeptide"

SEQ ID NO: 394 - DNA, 327 bp, Artificial Sequence; identical to SEQ ID NO: 137
  source: /note="Description of Artificial Sequence: Synthetic polynucleotide"

SEQ ID NO: 395 - protein, 121 aa, Artificial Sequence
  source: /note="Description of Artificial Sequence: Synthetic polypeptide"
QVQLQESGPGLVKPAGTLSLTCAVSGDSISSNHWWNWVRQSPGKGLEWIGEIFHSDIRILNPSLKRRVSMSVDRSKDQFSLQLTSVTAADTAVYYCARGFHGDSGRGLDTWGRGTLVTVSS

SEQ ID NO: 396 - DNA, 363 bp, Artificial Sequence
  source: /note="Description of Artificial Sequence: Synthetic polynucleotide"
caggtgcagctgcaggagtccggcccaggactcgtgaagcctgcggggactctgtccctcacctgcgctgtctccggtgactccatcagcagcaatcactggtggaattgggtccgccagtccccagggaagggactggaatggattggtgaaatctttcatagtgacattcgcatcctcaacccgtccctcaagaggcgcgtctccatgtcagtcgacaggtccaaggaccaattctccctgcaactgacctctgtgaccgccgcggacacggccgtgtattactgtgcgagaggtttccatggtgactccggcagaggacttgacacctggggcagaggaaccctggtcaccgtctcgagt

SEQ ID NO: 397 - protein, 109 aa, Artificial Sequence
  source: /note="Description of Artificial Sequence: Synthetic polypeptide"
SSELTQDPAVSVALGQTVRVTCQGDGLRSYYASWYQQKPGQAPVLVMYGNNNRPSGIPDRFSGSSSGNTASLTITGAQAEDEAVYYCNSRDSGANHLEVFGGGTKVTVL

SEQ ID NO: 398 - DNA, 327 bp, Artificial Sequence
  source: /note="Description of Artificial Sequence: Synthetic polynucleotide"
tcttctgagctgactcaggaccctgctgtgtctgtggccttgggacagacagtcagggtcacatgccaaggagacggcctcagaagttattatgcaagctggtaccagcagaagccagggcaggcccctgtccttgtcatgtatgggaacaacaaccggccctcagggatcccagaccgattctctggctccagctcgggaaacacagcttccttgaccatcactggggctcaggcggaagatgaggctgtctattattgtaattcgcgggacagcggtgctaaccatctggaggttttcggcggagggaccaaggtcaccgtccta

SEQ ID NO: 399 - protein, 119 aa, Artificial Sequence
  source: /note="Description of Artificial Sequence: Synthetic polypeptide"
QVQLQESGPGLVKPSETLSLTCTVSGYSISSGYYWGWIRQPPGRGLEWIGTIYHSGSTYYNPSLKSRLTISVDTSENQFSLKLSSVTAADTAVYYCARGIAGRTHYDYWGQGTMVTVSS

SEQ ID NO: 400 - DNA, 357 bp, Artificial Sequence
  source: /note="Description of Artificial Sequence: Synthetic polynucleotide"
caggtgcagctgcaggagtcgggcccaggactggtgaagccttcggagaccctgtccctcacctgcactgtctctggttactccattagcagtggttactactggggctggatccggcagcccccagggagggggctggagtggattgggactatctatcatagtgggagcacctactacaacccgtccctcaagagtcgactcaccatatcagtagacacgtccgagaaccaattctccctgaagctgagttctgtgaccgccgcagacacggccgtgtattactgtgcgagagggatagcaggtcggacccattatgactactggggccaggggacaatggtcaccgtctcgagt

SEQ ID NO: 401 - protein, 111 aa, Artificial Sequence
  source: /note="Description of Artificial Sequence: Synthetic polypeptide"
QAVLTQPSSVSGAPGQRVTISCSGSSSNIGAGYDVHWYQQLPGAAPKLLIYSNNHRPSGVPDRFSGSKSGTSASLAITGLQTEDEADYYCQSYDRSLSGRVFGGGTKLTVL

SEQ ID NO: 402 - DNA, 333 bp, Artificial Sequence
  source: /note="Description of Artificial Sequence: Synthetic polynucleotide"
caggctgtgctgactcagccgtcctcagtgtctggggccccagggcagagggtaaccatctcctgcagtgggagcagctccaacatcggggcaggttatgatgtacactggtaccagcagctcccaggagcagcccccaaactcctcatctatagtaacaatcatcggccctcaggggtccctgaccgattctctggctccaagtctggcacctcagcctccctggccatcactgggctccagactgaggatgaggctgattattactgccagtcctatgacagaagcctgagcggtagggtgttcggcggagggaccaagctgaccgtccta

SEQ ID NO: 403 - protein, 120 aa, Artificial Sequence
  source: /note="Description of Artificial Sequence: Synthetic polypeptide"
EVQLLESGGGLVQPGGSLRLSCAASGFTFSSYAMSWVRQAPGKGLEWVSAISGSGGSTYYADSVKGRFTISRDNSKNTLYLQMNSLRAEDTAVYYCAQGTHSSGWSFGYWGQGTLVTVSS

SEQ ID NO: 404 - DNA, 360 bp, Artificial Sequence
  source: /note="Description of Artificial Sequence: Synthetic polynucleotide"
gaggtgcagctgttggagtctgggggaggcttggtacagcctggggggtccctgagactctcctgtgcagcctctggattcacctttagcagctatgccatgagctgggtccgccaggctccagggaaggggctggagtgggtctcagctattagtggtagtggtggtagcacatactacgcagactccgtgaagggccggttcaccatctccagagacaattccaagaacacgctgtatctgcaaatgaacagcctgagagccgaggacacggccgtgtattactgtgcgcagggtactcatagcagtggctggtcctttgggtactggggccagggcaccctggtcaccgtctcgagt

SEQ ID NO: 405 - protein, 110 aa, Artificial Sequence
  source: /note="Description of Artificial Sequence: Synthetic polypeptide"
LPVLTQPPSASGTPGQRVTISCSGSSSNIGSKTVNWYQQLPGTTPKLLIYRNNQRPSGVPDRFSGSKSGTSASLAISGLQSEDEADYYCAAWDDSLNGLIFGGGTKVTVL

SEQ ID NO: 406 - DNA, 330 bp, Artificial Sequence
  source: /note="Description of Artificial Sequence: Synthetic polynucleotide"
ctgcctgtgctgactcagcccccctcagcgtctgggacccccgggcagagggtcaccatctcttgttctggaagcagctccaacatcggaagtaaaactgtaaactggtaccagcagctcccaggaacgacccccaaactcctcatctataggaataatcagcggccctcaggggtccctgaccgattctctggctccaagtctggcacctcagcctccctggccatcagtgggctccagtctgaggatgaggctgattattattgtgcagcatgggatgacagcctgaatggtctgatattcggcggagggaccaaggtcaccgtccta

SEQ ID NO: 407 - protein, 124 aa, Artificial Sequence
  source: /note="Description of Artificial Sequence: Synthetic polypeptide"
QVQLVQSGAEVKKPGESLKISCKTSGYSFTSYWIGWVRQMPGKGLEWMGIIYPGDSDTRYSPSFQGQVTISADKSISTAYLQWSSLKASDTAMYYCARHDLPHQEYQDNGMDVWGKGTLVTVSS

SEQ ID NO: 408 - DNA, 372 bp, Artificial Sequence
  source: /note="Description of Artificial Sequence: Synthetic polynucleotide"
caggtccagctggtacagtctggagcagaggttaaaaagcccggggagtctctgaagatctcctgtaagacttctggatacagctttaccagctattggatcggctgggtgcgccagatgcccgggaaaggcctggagtggatggggatcatctatcctggtgactctgataccagatacagcccgtcttttcaaggccaggtcaccatctcagccgacaagtccatcagcaccgcctacctgcagtggagcagcctgaaggcctcggacaccgccatgtattactgtgcgagacatgacctcccccatcaggagtatcaggacaacggtatggacgtctggggcaaaggaaccctggtcaccgtctcgagt

SEQ ID NO: 409 - protein, 110 aa, Artificial Sequence
  source: /note="Description of Artificial Sequence: Synthetic polypeptide"
QTVVIQEPSFSVSPGETVTLTCALSSGSVSSSYYPSWYQQTPGQAPRALIYNTNTRSSGVPDRFSGSILGNKAALTITGAQADDESNYYCALYLGSGIWVFGGGTKLTVL

SEQ ID NO: 410 - DNA, 330 bp, Artificial Sequence
  source: /note="Description of Artificial Sequence: Synthetic polynucleotide"
cagactgtggtgatccaggagccatcgttctcagtgtcccctggagagacagtcacactcacttgtgccttgagctctggctcagtctctagtagttactaccccagctggtaccagcagaccccaggccaggctccacgcgcgctcatctacaacacaaacactcgctcttctggggtccctgatcgcttctctggctccatccttgggaacaaagctgccctcaccatcacgggggcccaggcagatgatgaatctaactattactgtgcgctgtatctgggtagtggcatttgggtgttcggcggagggaccaagctgaccgtccta

SEQ ID NO: 411 - protein, 126 aa, Artificial Sequence
  source: /note="Description of Artificial Sequence: Synthetic polypeptide"
EVQLVQSGAEVKKPGESLKISCKGSGYSFPSYWIGWVRQMPGKGLEWMGIIYPGDSETRYSPSFQGQVTISADKSISTAYLQWSSLKASDTAMYYCVRHLKPVAGPAWHDYGMDVWGQGTLVTVSS

SEQ ID NO: 412 - DNA, 378 bp, Artificial Sequence
  source: /note="Description of Artificial Sequence: Synthetic polynucleotide"
gaggtccagctggtgcagtctggagcagaggtgaaaaagcccggggagtctctgaagatctcctgtaagggttctggatacagctttcccagctactggatcggctgggtgcgccagatgcccgggaaaggcctggagtggatggggatcatctatcctggtgactctgaaaccagatacagcccgtccttccaaggccaggtcaccatctcagccgacaagtccatcagcaccgcctacctgcagtggagcagcctgaaggcctcggacaccgccatgtattactgtgtgagacatctaaaaccagtggctggtcccgcttggcacgactacggtatggacgtctggggccagggcaccctggtcaccgtctcgagt

SEQ ID NO: 413 - protein, 110 aa, Artificial Sequence
  source: /note="Description of Artificial Sequence: Synthetic polypeptide"
QAVVLQEPSISVSPGGTVTLTCGLTSDSVSTTYYPSWYQQTPGQTPRTLSYSTNTRSSGVPDRFSGSILGNKAALTIAGAQADDEADYYCALYMGSGIWVFGGGTQLTVL

SEQ ID NO: 414 - DNA, 330 bp, Artificial Sequence
  source: /note="Description of Artificial Sequence: Synthetic polynucleotide"
caggctgtggtgctccaggagccatcgatctcagtgtcccctggagggacagtcacactcacttgtggcttaacctctgactcagtctcgactacttactaccccagctggtaccagcagaccccaggccagactccacgcacactcagctacagcacaaatactcgctcttctggggtccctgatcgcttctctggctccatccttgggaacaaagctgccctcaccatcgcgggggcccaggcagatgatgaagctgattattactgtgccctatatatgggcagtggcatttgggtgttcggcggagggacccagctcaccgtttta

SEQ ID NO: 415 - protein, 123 aa, Artificial Sequence
  source: /note="Description of Artificial Sequence: Synthetic polypeptide"
QVQLVQSGAEVKKPGESLKISCKGSGYSFANYGIGWVRQMPGKGLEWMGVIYPGDSDIRYSPSFQGQVIFSADRSISTAYLQWSSLKASDTAMYYCARHLSWLVGGNYGMDVWGKGTMVTVSS

SEQ ID NO: 416 - DNA, 369 bp, Artificial Sequence
  source: /note="Description of Artificial Sequence: Synthetic polynucleotide"
caggtgcagctggtgcagtctggagcagaggtgaaaaagcccggggagtctctgaagatctcctgtaagggttctggatacagttttgccaactacgggataggctgggtgcgccagatgcccgggaaaggcctggagtggatgggggtcatctatcctggtgactctgatatcagatacagcccgtccttccaaggccaggtcatcttctcagccgacaggtccatcagcaccgcctacctgcagtggagcagcctgaaggcctcggacaccgccatgtattattgtgcgagacatctctcgtggctggtcggggggaactacggtatggacgtctggggcaaagggacaatggtcaccgtctcgagt

SEQ ID NO: 417 - protein, 110 aa, Artificial Sequence
  source: /note="Description of Artificial Sequence: Synthetic polypeptide"
QTVVIQEPSFSVSPGGTVTLTCGLTSGSVSTSHYPSWYQQTPGQAPRTLIYSTNTRSSGVPGRFSGSILGNKAALTITGAQADDESDYYCVLYMGGGISVFGGGTKVTVL

SEQ ID NO: 418 - DNA, 330 bp, Artificial Sequence
  source: /note="Description of Artificial Sequence: Synthetic polynucleotide"
cagactgtggtgatccaggagccatcgttctcagtgtcccctggagggacagtcacactcacttgtggcttgacctctggctcagtctctactagtcactaccccagctggtaccagcagaccccaggccaggctccacgcacgctcatctacagcacaaacactcgctcttctggggtccctggtcgcttctctggctccatccttgggaacaaagctgccctcaccatcacgggggcccaggcagacgatgaatctgattattattgtgtgctgtatatgggtggtggcatttcggtgttcggcggagggaccaaggtcaccgtccta

SEQ ID NO: 419 - protein, 125 aa, Artificial Sequence
  source: /note="Description of Artificial Sequence: Synthetic polypeptide"
QVQLVQSGAEVKKPGESLKISCKGSGYSFTSQWIAWVRQMPGKGLEWMGIIYPGDSDTRYSPSFQGQVTISADKSINTAYLQWSSLKASDTAMYYCARHSGSSGDYYHYYGMDVWGQGTMVTVSS

SEQ ID NO: 420 - DNA, 375 bp, Artificial Sequence
  source: /note="Description of Artificial Sequence: Synthetic polynucleotide"
caggtgcagctggtgcaatctggggcagaggtgaaaaagcccggggagtctctgaagatctcctgtaagggttctggatacagctttaccagccagtggatcgcctgggtgcgccagatgcccgggaaaggcctggagtggatggggatcatctatcctggtgactctgatacgagatacagcccgtccttccaaggccaggtcaccatctcagccgacaagtccatcaacaccgcctacctgcagtggagcagcctgaaggcctcggacaccgccatgtattactgtgcgagacattcggggagctctggagattactaccactactacggtatggacgtctggggccaagggacaatggtcaccgtctcgagt

SEQ ID NO: 421 - protein, 110 aa, Artificial Sequence
  source: /note="Description of Artificial Sequence: Synthetic polypeptide"
QTVVIQEPSFSVSPGGTVTLTCGLSSGSVSTSYYPSWYQQTPGQAPRTLIYSTNTRSSGVPDRFSGSILGNKAALTITGAQADDESDYYCVLYMGSGISVFGGGTKLTVL

SEQ ID NO: 422 - DNA, 330 bp, Artificial Sequence
  source: /note="Description of Artificial Sequence: Synthetic polynucleotide"
cagactgtggtgatccaggagccatcgttctcagtgtcccctggagggacagtcacactcacttgtggcttgagctctggctcagtctctactagttactaccccagctggtaccagcagaccccaggccaggctccacgcacgctcatctacagcacaaacactcgctcttctggggtccctgatcgcttctctggctccatccttgggaacaaagctgccctcaccatcacgggggcccaggcagatgatgaatctgattattactgtgtgctgtatatggggagtggcatttcggtgttcggcggagggaccaagctgaccgtccta

SEQ ID NO: 423 - protein, 121 aa, Artificial Sequence
  source: /note="Description of Artificial Sequence: Synthetic polypeptide"
EVQLVQSGAEMKKPGESLKISCKTSGYSFTGSWIAWVRQMPGKGLEWMGIIYPGDSDTRYSPSFQGQVTISADKSISTAYLQWSSLKASDTAMYYCARIYSDSGYNWFDSWGRGTLVTVSS

SEQ ID NO: 424 - DNA, 363 bp, Artificial Sequence
  source: /note="Description of Artificial Sequence: Synthetic polynucleotide"
gaggtgcagctggtgcagtctggggcagagatgaaaaagcccggggagtctctgaagatatcctgcaagacttctggatacagctttaccggctcctggatcgcctgggtgcgccagatgcccgggaaaggcctggagtggatggggatcatctatcctggtgactctgacaccagatacagcccgtccttccaaggccaggtcaccatctcagccgacaagtccatcagcaccgcctacctgcagtggagcagcctgaaggcctcggacaccgccatgtattactgtgcgaggatttatagtgactcgggttacaattggttcgactcttggggcaggggaaccctggtcaccgtctcgagt

SEQ ID NO: 425 - protein, 110 aa, Artificial Sequence
  source: /note="Description of Artificial Sequence: Synthetic polypeptide"
QTVVIQEPSFSVSPGGTVTLTCGLSSGSVSNSHYPSWYQQTPGQAPRTLIYSTNTRSSGVPDRFSGSILGNKAALTITGAQADDESDFYCLLYLGSGISVFGGGTKLTVL

SEQ ID NO: 426 - DNA, 330 bp, Artificial Sequence
  source: /note="Description of Artificial Sequence: Synthetic polynucleotide"
cagactgtggtgatccaggagccatcgttctcagtgtcccctggagggacagtcacactcacttgtggcttgagctctggctcagtctctaatagtcactaccccagctggtatcagcagaccccaggccaggctccacgaacgctcatctacagcacaaacactcgctcttctggggtccctgatcgcttctctggctccatccttgggaacaaagctgccctcaccatcacgggggcccaggcggatgatgaatctgatttttactgtctgctatatctgggtagtggcatttcggtattcggcggagggaccaagctgaccgtccta

SEQ ID NO: 427 - protein, 122 aa, Artificial Sequence
  source: /note="Description of Artificial Sequence: Synthetic polypeptide"
EVQLVQSGAEVKKPGESLKISCQGSGYTFASQWIAWVRQMPGQGLEWMGTIWPGDSNPTYSPSFQGQVTISADKSISTAYLQWSSLKASDTAIYYCARLYNNYPYFYGMDVWGQGTMVTVSS

SEQ ID NO: 428 - DNA, 366 bp, Artificial Sequence
  source: /note="Description of Artificial Sequence: Synthetic polynucleotide"
gaggtgcagctggtgcagtctggagcagaggtgaagaagcccggggagtctctgaagatctcctgtcagggttctggatacacctttgccagccaatggatcgcctgggtgcgccagatgcccgggcaaggcctggagtggatggggaccatctggcctggtgactctaatcccacatatagcccgtccttccaaggccaggtcaccatctcagccgacaagtccatcagcaccgcctacctgcagtggagcagcctgaaggcctcggacaccgccatctattactgtgcgaggctctacaataactatccctacttctacggtatggacgtctggggccaggggacaatggtcaccgtctcgagt

SEQ ID NO: 429 - protein, 110 aa, Artificial Sequence
  source: /note="Description of Artificial Sequence: Synthetic polypeptide"
QTVVLQEPSFSVSPGGTVTLTCGLRSGSVSTTYYPSWYQQTPGQAPRTLIYSTNTRSSGVPDRFSGSIVGNKAALTITGAQADDESDYYCALYLGSGTWVFGGGTKLTVL

SEQ ID NO: 430 - DNA, 330 bp, Artificial Sequence
  source: /note="Description of Artificial Sequence: Synthetic polynucleotide"
cagactgtggtgctccaggagccatcgttctcagtgtcccctggagggacagtcacactcacttgtggcttgaggtctggctcagtctctactacttactaccccagctggtaccagcagaccccaggccaggctccacgcacgctcatctacagcacaaacactcgctcttctggggtccctgatcgcttctctggctccatcgtcgggaacaaagctgccctcaccatcacgggggcccaggcagatgatgaatctgattattactgtgcgctatacctgggtagtggcacttgggtgttcggcggagggaccaagctgaccgtccta

SEQ ID NO: 431 - protein, 126 aa, Artificial Sequence
  source: /note="Description of Artificial Sequence: Synthetic polypeptide"
EVQLVQSGAEVKKSGESLKISCKGSGYSFTSNWIGWVRQMPGKGLEWMGIIYPGDSDTRYSPSFQGQVTISADKSVSTAYLQWSSLKASDTAMYYCARMLTDCSSTSCYSAGMDVWGKGTLVTVSS

SEQ ID NO: 432 - DNA, 378 bp, Artificial Sequence
  source: /note="Description of Artificial Sequence: Synthetic polynucleotide"
gaggtccagctggtgcagtctggggcagaggtgaaaaagtccggggagtctctgaagatctcctgtaagggttctggatacagctttaccagtaattggatcggctgggtgcgccagatgcccgggaaaggcctggagtggatggggatcatctatcctggtgactctgataccagatacagcccgtccttccaaggccaggtcaccatctcagccgacaagtccgtcagcaccgcctacctgcagtggagcagcctgaaggcctcggacaccgccatgtattattgtgcgagaatgctgacggactgtagtagtaccagctgctattcagccggtatggacgtctggggcaaaggcaccctggtcaccgtctcgagt

SEQ ID NO: 433 - protein, 110 aa, Artificial Sequence
  source: /note="Description of Artificial Sequence: Synthetic polypeptide"
QAVVIQEPSFSVSPGGTVTLTCGLSSGSVSPSYYPSWYQQTPGQAPRTLIYSTNTRSSGVPDRFSGSILGNKAALTITGAQADDESDYYCVLYMGSGSWVFGGGTKLTVL

SEQ ID NO: 434 - DNA, 330 bp, Artificial Sequence
  source: /note="Description of Artificial Sequence: Synthetic polynucleotide"
caggctgtggtgatccaggagccatcgttctcagtgtcccctggagggacagtcacactcacttgtggcttgagttctggctcagtctctcctagttactaccccagctggtaccagcagaccccaggccaggctccacgcacactcatctacagcacaaacactcgctcttctggggtccctgatcgcttctctggctccatccttgggaacaaagctgccctcaccatcacgggggcccaggcagatgatgaatctgattattactgtgtgctgtatatgggtagtggctcttgggtgttcggcggagggaccaagctgaccgtccta

SEQ ID NO: 435 - protein, 121 aa, Artificial Sequence
  source: /note="Description of Artificial Sequence: Synthetic polypeptide"
QVQLVESGGGVVQPGRSLRLSCAASGFTFSSYAMNWVRQAPGKGLEWVATISYDGSNKYYADSVKGRFTISRDNSKNTLYLQMNSLRAEDTAVYYCARPAPYSSSGAFDIWGQGTLVTVSS

SEQ ID NO: 436 - DNA, 363 bp, Artificial Sequence
  source: /note="Description of Artificial Sequence: Synthetic polynucleotide"
caggtgcagctggtggagtctgggggaggcgtggtccagcctgggaggtccctgagactctcctgtgcagcctctggattcaccttcagtagctatgctatgaactgggtccgccaggctccaggcaaggggctggagtgggtggcaactatatcatatgatggaagcaataaatactacgcagactccgtgaagggccgattcaccatctccagagacaattccaagaacacgctgtatctgcaaatgaacagcctgagagccgaggacacggctgtgtattactgtgcgagaccggccccgtatagcagctccggcgcttttgatatctggggccaaggcaccctggtcaccgtctcttca

SEQ ID NO: 437 - protein, 108 aa, Artificial Sequence
  source: /note="Description of Artificial Sequence: Synthetic polypeptide"
DIQMTQSPSTLSASIGDRVTITCRASEGIYHWLAWYQQKPGKAPKLLTYKASSLASGAPSRFSGSGSGTDFTLTISSLQPDDFATYYCQQYSNYPLTFGGGTKLEIKR

SEQ ID NO: 438 - DNA, 324 bp, Artificial Sequence
  source: /note="Description of Artificial Sequence: Synthetic polynucleotide"
gacatccagatgacccagtctccttccaccctgtctgcatctattggagacagagtcaccatcacctgccgggccagtgagggtatttatcactggttggcctggtatcagcagaagccagggaaagcccctaaactcctgacctataaggcctctagtttagccagtggggccccatcaaggttcagcggcagtggatctgggacagatttcactctcaccatcagcagcctgcagcctgatgattttgcaacttattactgccaacaatatagtaattatccgctcactttcggcggagggaccaagctggagatcaaacgt

SEQ ID NO: 439 - protein, 128 aa, Artificial Sequence
  source: /note="Description of Artificial Sequence: Synthetic polypeptide"
QVQLVQSGGEVKKPGESLKISCKVSGDKFANYWIAWVRQVPGRGLEWMGIIYPSDSDVRYSPSFQGQVTMSADKSTSTAYLQLSSLKASDTAMYYCARQVGGLVTTDTDSYFYGMDVWGQGTLVTVSS

SEQ ID NO: 440 - DNA, 384 bp, Artificial Sequence
  source: /note="Description of Artificial Sequence: Synthetic polynucleotide"
caggtccagctggtgcagtctggaggagaggtgaaaaagcccggggagtctctgaagatctcctgtaaggtttctggagacaagtttgccaactactggatcgcctgggtgcgccaggtgcccgggagaggcctggagtggatgggaatcatctatcctagtgactctgatgtcagatatagtccgtccttccaaggccaagtcaccatgtcagccgacaagtccaccagcaccgcctacttgcagttgagcagcctgaaggcctcggacaccgccatgtattactgtgcaagacaggtgggtggactggttactacagacactgactcctacttctacggcatggacgtctggggccaaggaaccctggtcaccgtctcgagt

SEQ ID NO: 441 - protein, 110 aa, Artificial Sequence
  source: /note="Description of Artificial Sequence: Synthetic polypeptide"
QAVVIQEPSFSVSPGGTVTLTCGLSSGPVSTSYYPSWFQQTPGQAPRTLIYSTNTRSSGVPDRFSGSILGNKAALTITGAQADDESDYYCVLYVGSGISLFGGGTKVTVL

SEQ ID NO: 442 - DNA, 330 bp, Artificial Sequence
  source: /note="Description of Artificial Sequence: Synthetic polynucleotide"
caggctgtggtgatccaggagccatcgttctcagtgtcccctggagggacagtcacactcacttgtggcttgagctctggcccagtctctactagttactaccccagctggttccaacagaccccaggccaggctccacgcacgctcatctacagcacaaacactcgctcttctggggtccctgatcgcttctctggctccatccttgggaacaaagctgccctcaccatcacgggggcccaggcagatgatgaatctgattattactgtgtgttgtatgtgggtagtggcatttcgctattcggcggggggaccaaggtcaccgtccta

SEQ ID NO: 443 - protein, 128 aa, Artificial Sequence
  source: /note="Description of Artificial Sequence: Synthetic polypeptide"
QVQLVQSGGEVKKPGESLKISCKVSGDSFTNYWIAWVRQMPGRGLEWMGIIYPSDSDVRYSPSFQGQVTMSADKSISTAYLQLSSLKASDTAMYYCARQVGGLVTTDTDSYFYGMDVWGRGTLVTVSS

SEQ ID NO: 444 - DNA, 384 bp, Artificial Sequence
  source: /note="Description of Artificial Sequence: Synthetic polynucleotide"
caggtccagctggtgcagtctggaggagaggtgaaaaagcccggggagtctctgaagatctcctgtaaggtttctggagacagctttaccaactactggatcgcctgggtgcgccagatgcccgggagaggcctggagtggatgggaatcatctatcctagtgactctgatgtcagatatagtccgtccttccaaggccaggtcaccatgtcagccgacaagtccatcagcaccgcctacctgcagttgagcagcctgaaggcctcggacaccgccatgtattactgtgcaagacaggtgggtggactggttactacagacactgactcctacttctacggcatggacgtctggggcagaggcaccctggtcaccgtctcgagt

SEQ ID NO: 445 - protein, 110 aa, Artificial Sequence
  source: /note="Description of Artificial Sequence: Synthetic polypeptide"
QTVVIQEPSFSVSPGGTVTLTCALNSGSVSTNYYPSWYQQTPGQAPRTLIHSTNTRSSGVPDRFSGSILGNNAALTITGAQAEDESDYYCALYMGSGISIFGGGTKLTVL

SEQ ID NO: 446 - DNA, 330 bp, Artificial Sequence
  source: /note="Description of Artificial Sequence: Synthetic polynucleotide"
cagactgtggtgatccaggagccatcgttctcagtgtcccctggagggacagtcacactcacttgtgccttgaactccggctcagtctctactaattactaccccagctggtaccagcagaccccaggccaggctccacgcacgctcatccacagcacaaacactcgctcttctggggtccctgatcgcttctctggctccatccttgggaacaatgctgccctcaccatcacgggggcccaggcagaggatgaatctgattattactgtgcgctatatatgggtagtggcatttcgatattcggcggagggaccaagctgaccgtccta

SEQ ID NO: 447 - protein, 122 aa, Artificial Sequence
  source: /note="Description of Artificial Sequence: Synthetic polypeptide"
QVQLQESGPGLVEPSETLSLTCSVSGGSISSSSSSWGWIRQPPGKGLEWIGSIYYSGETYYNPSLKRRVTISTDTSKNQLSLELASVTAADTAVYYCARQVTSYGSDYFDYWGKGTLVTVSS

SEQ ID NO: 448 - DNA, 366 bp, Artificial Sequence
  source: /note="Description of Artificial Sequence: Synthetic polynucleotide"
caggtgcagctgcaggagtcgggcccaggactggtggagccttcggagaccctgtccctcacctgcagtgtctctggcggctccatcagcagcagtagttcctcttggggctggatccgccagcccccagggaaggggctggagtggattgggagtatctattacagtggagaaacctattataatccgtccctcaagaggcgtgtcaccatatccacagacacgtccaagaaccagttgtccctggagctggcctctgtgaccgccgcagacacggctgtatattactgtgcgaggcaagtcaccagttatggttctgactactttgactactggggcaaaggaaccctggtcaccgtctcgagt

SEQ ID NO: 449 - protein, 110 aa, Artificial Sequence
  source: /note="Description of Artificial Sequence: Synthetic polypeptide"
QAVVIQEPSFSVSPGGTVTLTCGLSSGSVSSNYYPSWYQQTPGQTPRTLIYNTNTRSSGVPDRFSGSILGNKAALTITGAQADDESDYYCVLYMGSGIRVFGGGTKVTVL

SEQ ID NO: 450 - DNA, 330 bp, Artificial Sequence
  source: /note="Description of Artificial Sequence: Synthetic polynucleotide"
caggctgtggtgatccaggagccatcgttctcagtgtcccctggagggacagtcacacttacttgtggcttgagctctggctcagtctcttctaattactaccccagctggtaccagcagaccccaggccagactccacgcacgctcatctacaacacaaacactcgctcttctggggtccctgatcgcttctctggctccatccttgggaacaaagctgccctcaccatcacgggggcccaggcagatgatgaatctgattattactgtgtgttgtatatgggtagtggcattcgcgtgttcggcggagggaccaaggtcaccgtccta

SEQ ID NO: 451 - protein, 120 aa, Artificial Sequence
  source: /note="Description of Artificial Sequence: Synthetic polypeptide"
EVQLVQSGAEVRKPGASVKVSCRSSGYTFTTYYLHWLRQAPGQGLEWMGVINPSGGATAYAQSFQGRVTMTRDTATSTVYLDLSSLRTEDTAVYYCARSTPAEQLVPGFWGKGTMVTVSS

SEQ ID NO: 452 - DNA, 360 bp, Artificial Sequence
  source: /note="Description of Artificial Sequence: Synthetic polynucleotide"
gaagtgcagctggtgcagtctggggctgaggtgaggaagcctggggcctcagtgaaggtttcctgcaggtcatctggatacaccttcaccacctactatttgcactggctacgacaggcccctggacaagggcttgagtggatgggagtaattaaccctagcggcggtgccacagcctacgcgcagagtttccagggcagagtcaccatgaccagggacacggctacgagcacagtctatttggatctgagcagcctgagaactgaagacacggccgtgtattactgtgcgagatccaccccggcggagcagctcgtcccgggcttctggggcaaagggacaatggtcaccgtctcgagt

SEQ ID NO: 453 - protein, 109 aa, Artificial Sequence
  source: /note="Description of Artificial Sequence: Synthetic polypeptide"
EIVMTQSPATLSVSPGDRATLSCRASQSVSTNVAWYQQKPGQPPRLLIYGASTRASGVPARFSGSGSGTEFTLTISSLQSEDFAVYYCQQYGDWPPITFGQGTRLEIKR

SEQ ID NO: 454 - DNA, 327 bp, Artificial Sequence
  source: /note="Description of Artificial Sequence: Synthetic polynucleotide"
gaaattgtgatgacgcagtctccagccaccctgtctgtgtctccaggggacagagccaccctctcctgcagggccagtcagagtgttagcaccaacgtagcctggtaccagcagaaacctggccaacctcccaggctcctcatctatggtgcatccaccagggcctctggtgtcccagccaggttcagtggcagtgggtctgggacagagttcactctcaccatcagcagtctgcagtctgaagattttgcagtttattactgtcaacagtatggtgactggcctccgatcaccttcggccaagggacacgactggagattaaacgt

SEQ ID NO: 455 - protein, 123 aa, Artificial Sequence
  source: /note="Description of Artificial Sequence: Synthetic polypeptide"
EVQLVESGGGLVQPGGSLKLSCAASGLNFDISTVHWVRQASGKGLEWIGRIRSKAYNYATAYTESLKGRFIISRDESKNTADLQINSLKTEDTATYYCSMTFGDYYYYGMDVWGRGTLVTVSS

SEQ ID NO: 456 - DNA, 369 bp, Artificial Sequence
  source: /note="Description of Artificial Sequence: Synthetic polynucleotide"
gaggtgcagctggtggagtccgggggaggcttggtccagccgggggggtccctaaaactttcctgtgcagcctctgggctcaatttcgatatctctactgtgcactgggtccgccaggcttccgggaaagggctggagtggattggccgtattagaagcaaagcttacaattatgcgacagcatatactgagtcgctgaagggcaggttcatcatctccagagatgagtcaaagaatacggcggatctgcaaatcaacagcctgaaaaccgaggacacggccacatattactgtagtatgaccttcggtgactactactactacggcatggacgtctggggccggggcaccctggtcaccgtctcgagt

SEQ ID NO: 457 - protein, 109 aa, Artificial Sequence
  source: /note="Description of Artificial Sequence: Synthetic polypeptide"
QAVLTQPSSVSGAPGQRVTITCTGSSSNIGAGYDVHWYQQLPGTAPKLLIYSNSYRPSGVSDRFSGSKSGTSASLVIAGLQAEDEADYYCQSYDSSHWFFGGGTKLTVL

SEQ ID NO: 458 - DNA, 327 bp, Artificial Sequence
  source: /note="Description of Artificial Sequence: Synthetic polynucleotide"
caggctgtgctgactcagccgtcctcagtgtctggggccccagggcagagggtcaccatcacctgcactggaagcagctccaacatcggggccggttacgatgttcactggtaccagcaacttccaggaacagcccccaaactcctcatctatagtaattcttatcggccctctggggtctctgaccgattctctggctccaagtctggcacctcagcctccctggtcatcgctggactccaggctgaggatgaggctgattattactgtcagtcctatgacagcagtcattggtttttcggcggagggaccaagctgaccgtccta

SEQ ID NO: 459 - protein, 122 aa, Artificial Sequence
  source: /note="Description of Artificial Sequence: Synthetic polypeptide"
QVQLQQSGAEVKKPGASVKVSCKVSGYTPPDLSIHWVRQAPGEGLEWMGRFDFEDGETINAQKFQGRVTMTADTSTNTGYMEVSSLRFEDTAVYYCATTLRFSGYYYGMDFWGRGTLVTVSS

SEQ ID NO: 460 - DNA, 366 bp, Artificial Sequence
  source: /note="Description of Artificial Sequence: Synthetic polynucleotide"
caggtacagctgcagcagtcaggggctgaggtgaagaagcctggggcctcagtgaaggtctcctgcaaggtttccggatacaccccccctgatttatccatccactgggtgcgacaggctcctggagaagggcttgagtggatgggacgttttgattttgaagatggtgaaacaatcaacgcacagaagttccagggcagagtcaccatgaccgcggacacatccacaaacacaggctacatggaggtgagcagcctgagatttgaggacacggccgtgtattactgtgcaacaacacttcgattttctggttactactacggtatggacttctggggccgaggaaccctggtcaccgtctcgagt

SEQ ID NO: 461 - protein, 110 aa, Artificial Sequence
  source: /note="Description of Artificial Sequence: Synthetic polypeptide"
QAVVIQEPSLSVSPGGTVTLTCALSSGSVSTGYYPSWYQQTPGQAPRTLIYNTDTRSSGVPGRFSGSILGDKAALTITGAQADDESDYYCVLYMGSGIWVFGGGTKVTVL

SEQ ID NO: 462 - DNA, 330 bp, Artificial Sequence
  source: /note="Description of Artificial Sequence: Synthetic polynucleotide"
caggctgtggtgatccaggagccatcgctctcagtgtcccctggagggacagtcacactcacttgtgccttgagctctggctcagtctccactggttactaccccagctggtaccagcagaccccaggccaggctccacgcacgctcatttacaacacagacactcgctcttctggggtccctggtcgcttctctggctccatccttggggacaaagctgccctcaccatcacgggggcccaggcagatgatgaatctgattattactgtgtgctgtatatgggtagtggcatttgggtgttcggcggagggaccaaggtcaccgtccta

SEQ ID NO: 463 - protein, 124 aa, Artificial Sequence
  source: /note="Description of Artificial Sequence: Synthetic polypeptide"
EVQLVQSGAEVKKPGESLKISCKGSGYNFNTHWIGWVRQMPGKGLEWMGLIYPDDSDTRFSPSFEGQVTLSADRSISTAYLQWTSLKASDTAMYYCARYKKSSGYYTGYGMDVWGRGTMVTVSS

SEQ ID NO: 464 - DNA, 372 bp, Artificial Sequence
  source: /note="Description of Artificial Sequence: Synthetic polynucleotide"
gaagtgcagctggtgcagtctggagcagaggtgaaaaagcccggggagtctctgaagatctcctgtaagggttctggatacaactttaacactcactggatcgggtgggtgcgccagatgcccgggaaaggcctggagtggatggggctcatctaccctgatgactctgacacccgattcagcccgtccttcgaaggccaggtcaccctctcagccgacaggtccatcagtaccgcctacctgcagtggaccagcctgaaggcctcggacaccgccatgtattactgtgcgagatacaaaaaaagtagtggttattacacaggatatggtatggacgtctggggccgagggacaatggtcaccgtctcgagt

SEQ ID NO: 465 - protein, 110 aa, Artificial Sequence
  source: /note="Description of Artificial Sequence: Synthetic polypeptide"
QTVVIQEPSFSVSPGGTVTLTCGLSSGSVSTSYYPTWYQQTPGQAPRTLIYSTNSRFSGVPDRFSGSILGSKAALTITGAQADDESDYYCVLYMGSGISVFGGGTKVTVL

SEQ ID NO: 466 - DNA, 330 bp, Artificial Sequence
  source: /note="Description of Artificial Sequence: Synthetic polynucleotide"
cagactgtggtgatccaggagccatcgttctcagtgtcccctggagggacagtcacactcacttgtggcttgagctctggctcagtctctactagttactaccccacctggtaccagcagaccccaggccaggctccacgcacgctcatctatagcacaaacagtcgcttttctggggtccctgatcgcttctctggctccatccttgggagcaaagctgccctcaccatcacgggggcccaggcagatgatgaatctgattattactgtgtgctatatatgggtagtggcatttcggtgttcggcggagggaccaaggtcaccgtccta

SEQ ID NO: 467 - protein, 118 aa, Artificial Sequence
  source: /note="Description of Artificial Sequence: Synthetic polypeptide"
EVQLLESGGGLVQPGGSLRLSCAASGFTFSSYAMSWVRQAPGKGLEWVSAISGSGGSTYYADSVKGRFTISRDNSKNTLYLQMNSLRAEDTAVYYCATSLGYGDFDYWGRGTTVTVSS

SEQ ID NO: 468 - DNA, 354 bp, Artificial Sequence
  source: /note="Description of Artificial Sequence: Synthetic polynucleotide"
gaggtgcagctgttggagtctgggggaggcttggtacagcctggggggtccctgagactctcctgtgcagcctctggattcacctttagcagctatgccatgagctgggtccgccaggctccagggaaggggctggagtgggtctcagctattagtggtagtggtggtagcacatactacgcagactccgtgaagggccggttcaccatctccagagacaattccaagaacacgctgtatctgcaaatgaacagcctgagagccgaggacacggccgtgtattactgtgcaacttcgttgggttacggtgactttgactactgggggcgagggaccacggttaccgtctcgagt

SEQ ID NO: 469 - protein, 110 aa, Artificial Sequence
  source: /note="Description of Artificial Sequence: Synthetic polypeptide"
QAVLTQPSSASGAPGHRVIISCSGSSSNIGSYYVSWYQQLPGAAPKLLIYRNDERPSGVPARFSGSTSGTSASLAISGLHSEDEADYYCAAWDDSLNGPVFGGGTKVTVL

SEQ ID NO: 470 - DNA, 330 bp, Artificial Sequence
  source: /note="Description of Artificial Sequence: Synthetic polynucleotide"
caggctgtgctgactcagccgtcctcagcgtctggggcccccgggcacagggtcatcatctcttgttctggaagcagctccaacatcggaagttattatgtaagctggtaccagcagctcccaggagcggcccccaaactcctcatctatcgtaatgatgagcggccctcaggggtccctgcccgattctctggctccacgtctggcacctcagcctccctggccatcagtgggctccactctgaggatgaggctgattattattgtgcagcatgggatgacagcctgaatggtccggttttcggcggagggaccaaggtcaccgtccta

SEQ ID NO: 471 - protein, 122 aa, Artificial Sequence
  source: /note="Description of Artificial Sequence: Synthetic polypeptide"
EVQLLESGGGLVQPGGSLRLSCAASGFTFSSYAMSWVRQAPGKGLEWVSAISGSGGSTYYADSVKGRFTISRDNSKNTLYLQMNSLRAEDTAVYYCAVHGYGDSVDDALDVWGRGTLVTVSS

SEQ ID NO: 472 - DNA, 366 bp, Artificial Sequence
  source: /note="Description of Artificial Sequence: Synthetic polynucleotide"
gaggtgcagctgttggagtctgggggaggcttggtacagcctggggggtccctgagactctcctgtgcagcctctggattcacctttagcagctatgccatgagctgggtccgccaggctccagggaaggggctggagtgggtctcagctattagtggtagtggtggtagcacatactacgcagactccgtgaagggccggttcaccatctccagagacaattccaagaacacgctgtatctgcaaatgaacagcctgagagccgaggacacggccgtgtattactgtgcggtccatggctacggagactccgtggatgatgctcttgatgtctggggccgaggaaccctggtcaccgtctcgagt

SEQ ID NO: 473 - protein, 110 aa, Artificial Sequence
  source: /note="Description of Artificial Sequence: Synthetic polypeptide"
QSVLTQPPSASGTPGQTISISCSGSNSNIGTYSVSWYQQLPRAAPRLLVYANDRRPSGVPDRFSGSKSGTSASLAISGLQSEDEADYYCAVWDDRLNGFVFGTGTKLTVL

SEQ ID NO: 474 - DNA, 330 bp, Artificial Sequence
  source: /note="Description of Artificial Sequence: Synthetic polynucleotide"
cagtctgtgctgacgcagccgccctcagcgtctgggacccccgggcagacgatctccatctcttgttctggaagcaactccaacatcggaacttatagtgttagctggtaccagcagctcccacgagcggcccccagactcctcgtctatgctaatgatcgccggccctcaggggtccctgaccgattctctggctccaagtctggcacctcagcctccctggccatcagtgggctccagtctgaggatgaggctgattattactgtgcagtatgggatgacaggttgaatggttttgtcttcggaactgggaccaagctgaccgtccta

SEQ ID NO: 475 - protein, 128 aa, Artificial Sequence
  source: /note="Description of Artificial Sequence: Synthetic polypeptide"
EVQLLESGGGLVQPGGSLRLSCAASGFTFSSYAMSWVRQAPGKGLEWVSAISGSGGSTYYADSVKGRFTISRDNSKNTLYLQMNSLRAEDTAVYYCARDDDFWSGYPFLYYYYGMDVWGRGTMVTVSS

SEQ ID NO: 476 - DNA, 384 bp, Artificial Sequence
  source: /note="Description of Artificial Sequence: Synthetic polynucleotide"
gaggtgcagctgttggagtctgggggaggcttggtacagcctggggggtccctgagactctcctgtgcagcctctggattcacctttagcagctatgccatgagctgggtccgccaggctccagggaaggggctggagtgggtctcagctattagtggtagtggtggtagcacatactacgcagactccgtgaagggccggttcaccatctccagagacaattccaagaacacgctgtatctgcaaatgaacagcctgagagccgaggacacggccgtgtattactgtgcgagagatgacgatttttggagtggttatccattcctctactactactacggtatggacgtctggggccgagggacaatggtcaccgtctcgagt

SEQ ID NO: 477 - protein, 111 aa, Artificial Sequence
  source: /note="Description of Artificial Sequence: Synthetic polypeptide"
QSVVTQPPSASGTPGQRVTISCSGTSSNIGSNAVNWYQQLPGTAPKLLIYNNNQRPSGVPDRFSGSKSGTSASLAISGLQSEDEADYYCAAWDDSLNVYVVFGGGTKLTVL

SEQ ID NO: 478 - DNA, 333 bp, Artificial Sequence
  source: /note="Description of Artificial Sequence: Synthetic polynucleotide"
cagtctgtcgtgacgcagccgccctcagcgtctgggacccccgggcagagggtcaccatctcttgttctggaactagttccaacatcggaagtaatgctgtaaactggtaccagcaactcccaggaacggcccccaaactcctcatctataataataatcagcggccctcaggggtccctgaccgattctctggctccaagtctggcacctcagcctccctggccatcagtggactccagtctgaggatgaggctgattattactgtgcagcatgggatgacagcctgaatgtttatgtggtattcggcggagggaccaagctgaccgtccta

SEQ ID NO: 479 - protein, 128 aa, Artificial Sequence
  source: /note="Description of Artificial Sequence: Synthetic polypeptide"
QVQLQESGPGLVKPSETLSLTCTVSGGSITSDLSYWGWLRQPPGKGLEWIASGGDGESTYYNPSLNGRVTFSVDTPKNQFSLRLSSVTAADTAVYYCARHPLYYCSGGRCYSGNFDFWGQGTLVTVSS

SEQ ID NO: 480 - DNA, 384 bp, Artificial Sequence
  source: /note="Description of Artificial Sequence: Synthetic polynucleotide"
caggtgcagctgcaggagtcgggcccaggactggtgaagccttcggagaccctgtccctcacctgcactgtctctggtggctccatcaccagtgatctttcctactggggctggctccgccagccccccgggaagggtctggagtggattgcgagtggtggtgacggtgagagcacctactacaacccgtccctcaacggtcgagtcaccttttccgtggacacgcccaagaaccaattctccctgaggctgagctctgtgaccgccgcagacacggctgtatattactgtgcgagacacccactctactattgtagtggtggtcgctgctactccgggaactttgacttttggggccagggaaccctggtcaccgtctcgagt

SEQ ID NO: 481 - protein, 110 aa, Artificial Sequence
  source: /note="Description of Artificial Sequence: Synthetic polypeptide"
QAVLTQPSSASGTPGQRVTISCSGTTPNIGSNFVYWYQQLPGTAPKLLIYRNEQRPSGVPVRFSGSKSGTSASLAISDLRSEDEADYYCAAWDDSLSGVVFGGGTKLTVL

SEQ ID NO: 482 - DNA, 330 bp, Artificial Sequence
  source: /note="Description of Artificial Sequence: Synthetic polynucleotide"
caggctgtgctgactcagccgtcctcagcgtctgggacccccggtcagagggtcaccatttcttgttctggaacgacccccaatattggaagtaattttgtctactggtatcaacaactcccagggacggcccccaaactcctcatctacaggaatgagcagcgcccttcaggggtccctgtccgattctctggctccaagtctggcacatcagcctccctggccatcagtgacctccggtccgaggatgaggctgactattactgtgcagcgtgggatgacagcctgagtggtgtggtcttcggcggggggaccaagctgaccgtccta

SEQ ID NO: 483 - protein, 120 aa, Artificial Sequence
  source: /note="Description of Artificial Sequence: Synthetic polypeptide"
EVQLLESGGGLVQPGGSLRLSCAASGFTFSSYAMSWVRQAPGKGLEWVSAISGSGGSTYYADSVKGRFTISRDNSKNTLYLQMNSLRAEDTAVYYCAKYGGYDADAFDVWGRGTMVTVSS

SEQ ID NO: 484 - DNA, 360 bp, Artificial Sequence
  source: /note="Description of Artificial Sequence: Synthetic polynucleotide"
gaggtgcagctgttggagtctgggggaggcttggtacagcctggggggtccctgagactctcctgtgcagcctctggattcacctttagcagctatgccatgagctgggtccgccaggctccagggaaggggctggagtgggtctcagctattagtggtagtggtggtagcacatactacgcagactccgtgaagggccggttcaccatctccagagacaattccaagaacacgctgtatctgcaaatgaacagcctgagagccgaggacacggccgtgtattactgtgcgaagtatggtggctacgacgctgatgcctttgatgtctggggccgagggacaatggtcaccgtctcgagt

SEQ ID NO: 485 - protein, 110 aa, Artificial Sequence
  source: /note="Description of Artificial Sequence: Synthetic polypeptide"
QSVVTQPPSVSAAPGQKVTISCSGSSSNIGDYYVSWYQQLPGTAPTLLIYDNDKRPSEVPDRFSGSKSGTSATLGITGLQTGDEADYYCTSWDSSLSAGVFGGGTKVTVL

SEQ ID NO: 486 - DNA, 330 bp, Artificial Sequence
  source: /note="Description of Artificial Sequence: Synthetic polynucleotide"
cagtctgtcgtgacgcagccgccctcagtgtctgcggccccaggacagaaggtcaccatctcctgctctggaagtagctccaacattggagattattatgtatcctggtaccagcaactcccaggaacggcccccacactcctcatttatgacaatgataagcgaccctcagaagttcctgaccgattctctggctccaagtctggcacgtcggccaccctcggcatcaccggactccagactggggacgaggccgattattactgcacttcatgggatagcagcctgagtgctggggtgttcggcggagggaccaaggtcaccgtccta

SEQ ID NO: 487 - protein, 125 aa, Artificial Sequence
  source: /note="Description of Artificial Sequence: Synthetic polypeptide"
EVQLLESGGGLVQPGGSLRLSCAASGFTFSSYAMSWVRQAPGKGLEWVSAISGSGGSTYYADSVKGRFTISRDNSKNTLYLQMNSLRAEDTAVYYCAKWGWDYYDTTGHDAFDFWGRGTMVTVSS

SEQ ID NO: 488 - DNA, 375 bp, Artificial Sequence
  source: /note="Description of Artificial Sequence: Synthetic polynucleotide"
gaggtgcagctgttggagtctgggggaggcttggtacagcctggggggtccctgagactctcctgtgcagcctctggattcacctttagcagctatgccatgagctgggtccgccaggctccagggaaggggctggagtgggtctcagctattagtggtagtggtggtagcacttactacgcagactccgtgaagggccggttcaccatctccagagacaattccaagaacacgctgtatctgcaaatgaacagcctgagagccgaggacacggccgtgtattactgtgctaaatggggctgggattactatgacacaactggtcatgatgcctttgatttctggggccgggggacaatggtcaccgtctcgagt

SEQ ID NO: 489 - protein, 111 aa, Artificial Sequence
  source: /note="Description of Artificial Sequence: Synthetic polypeptide"
QAVLTQPSSVSGAPGQRVTISCTGSSSNIGADYYVNWYQQLPGKAPEIVIFNDDNRPSGVPNRFSGSKSGTSASLAITGLQAEDEADYYCQSYDSVLSAYVFGTGTKVTVL

SEQ ID NO: 490 - DNA, 333 bp, Artificial Sequence
  source: /note="Description of Artificial Sequence: Synthetic polynucleotide"
caggctgtgctgactcagccgtcctcagtgtctggggccccagggcagagggtcaccatctcctgcactgggagcagctccaacatcggggcagattattatgtaaattggtatcagcaacttccaggaaaagcccccgaaatcgtaatttttaatgatgacaatcggccctcaggggtccctaaccgattctctggctccaagtctggcacctcagcctccctggccatcactgggctccaggctgaagatgaggctgattattattgccagtcttatgacagtgtcctgagtgcttatgtcttcggaactgggaccaaggtcaccgtccta

SEQ ID NO: 491 - protein, 120 aa, Artificial Sequence
  source: /note="Description of Artificial Sequence: Synthetic polypeptide"
EVQLLESGGGLVQPGGSLRLSCAASGFTFSSYTMSWVRQAPGKGLEWVSAISGSGGSTYYADSVKGRFTISRDNSKNTLYLQMNSLRAEDTAVYYCARNSSNWSGAFDIWGRGTTVTVSS

SEQ ID NO: 492 - DNA, 360 bp, Artificial Sequence
  source: /note="Description of Artificial Sequence: Synthetic polynucleotide"
gaggtgcagctgttggagtctgggggaggcttggtacagcctggggggtccctgagactctcctgtgcagcctctggattcacctttagcagctataccatgagctgggtccgccaggctccagggaaggggctggagtgggtctcagctattagtggtagtggtggtagcacatactacgcagactccgtgaagggccggttcaccatctccagagacaattccaagaacacgctgtatctgcaaatgaacagcctgagagccgaggacacggccgtgtattactgtgcaaggaatagcagcaattggagtggtgcttttgatatctgggggcgggggaccacggtcaccgtctcgagt

SEQ ID NO: 493 - protein, 110 aa, Artificial Sequence
  source: /note="Description of Artificial Sequence: Synthetic polypeptide"
QSVLTQPPSVSGAPGQRVTISCIGTHSNIGAGYAVNWYQQLPGTAPKLLIYGNNNRPSGVPDRFSGSKSGTSASLAINGLQADDESDYYCQSYDASLRVLFGGGTKLTVL

SEQ ID NO: 494 - DNA, 330 bp, Artificial Sequence
  source: /note="Description of Artificial Sequence: Synthetic polynucleotide"
cagtctgtgctgacgcagccgccctcagtgtctggggccccagggcagagggtcaccatctcctgcattggaacccactcaaacatcggggcaggttacgctgtgaactggtaccagcagcttccaggaacagcccccaaactcctcatctatggtaataacaatcggccctcaggggtccctgaccgattctctggctccaagtctggcacctcagcctccctggccatcaatgggctccaggctgacgatgagtctgattattattgccagtcctatgacgccagtctgagagttttattcggcggagggaccaagctgaccgtccta

SEQ ID NO: 495 - protein, 121 aa, Artificial Sequence
  source: /note="Description of Artificial Sequence: Synthetic polypeptide"
EVQLVQSGAEVKKPGESLKISCKGSGYSFSNYWIGWVRQMPGKGLEWMGIIYPGDSDTRYSPSFQGQVTISADKSISTAYLQWSSLKASDSAMYYCARHDSTMGYDAFHMWGQGTLVTVSS

SEQ ID NO: 496 - DNA, 363 bp, Artificial Sequence
  source: /note="Description of Artificial Sequence: Synthetic polynucleotide"
gaggtgcagctggtgcagtctggggcagaggtgaaaaagcccggggagtctctgaagatctcctgtaagggttctgggtacagctttagtaactactggatcggctgggtgcgccagatgcccgggaaaggcctggagtggatggggatcatctatcctggtgactctgataccagatacagcccgtccttccaaggccaggtcaccatctcagccgacaagtccatcagtaccgcctacctgcagtggagcagcctgaaggcctcggacagtgccatgtattactgtgcgagacatgattcgactatgggatatgatgcttttcatatgtggggccaaggaaccctggtcaccgtctcgagt

SEQ ID NO: 497 - protein, 112 aa, Artificial Sequence
  source: /note="Description of Artificial Sequence: Synthetic polypeptide"
QAVLTQPSSVSGAPGQRVTISCTGSSSNIGAGYDVHWYQQLPGTAPKLLIYGNSNRPSGVPDRFSGSKSGTSASLAITGLQAEDEADYYCQSYDSSLSGPVVFGGGTKLTVL

SEQ ID NO: 498 - DNA, 336 bp, Artificial Sequence
  source: /note="Description of Artificial Sequence: Synthetic polynucleotide"
caggctgtgctgactcagccgtcctcagtgtctggggccccagggcagagggtcaccatctcctgcactgggagcagctccaacatcggggcaggttatgatgtacactggtaccagcagcttccaggaacagcccccaaactcctcatctatggtaacagcaatcggccctcaggggtccctgaccgattctctggctccaagtctggcacctcagcctccctggccatcactgggctccaggctgaggatgaggctgattattactgccagtcctatgacagcagcctgagtggccctgtggtattcggcggagggaccaagctgaccgtccta

SEQ ID NO: 499 - protein, 119 aa, Artificial Sequence
  source: /note="Description of Artificial Sequence: Synthetic polypeptide"
QVQLVQSGAEIKKPGESLKISCEGSGYRFTSHWIGWVRQMPGKGLEWMGIIYPGDSDTRYSPSFQGQVTISADKSISTAYLQWSSLKASDTAMYYCARHSATHDAFDIWGRGTLVTVSS

SEQ ID NO: 500 - DNA, 357 bp, Artificial Sequence
  source: /note="Description of Artificial Sequence: Synthetic polynucleotide"
caggtgcagctggtgcagtctggggcagaaataaaaaagccgggggagtctctgaagatctcctgtgagggttctggatacaggtttaccagccactggatcggctgggtgcgccagatgcccgggaaaggcctggagtggatggggatcatctatcctggtgactctgataccagatacagcccgtccttccaaggccaggtcaccatctcagccgacaagtccatcagcaccgcctacctgcagtggagcagcctgaaggcctcggacaccgccatgtattactgtgcgagacatagtgcgacgcatgatgcttttgatatctggggccggggcaccctggtcaccgtctcgagt

SEQ ID NO: 501 - protein, 112 aa, Artificial Sequence
  source: /note="Description of Artificial Sequence: Synthetic polypeptide"
QSVLTQPPSVSGAPGQRVTISCSGSSSNIGTGYDVHWYQQLPGTAPKLLIYSFNKRPSGVPDRFSASKSGTSASLVITGLQAEDEADYYCQSYDNLSGPHVVFGTGTKLTVL

SEQ ID NO: 502 - DNA, 336 bp, Artificial Sequence
  source: /note="Description of Artificial Sequence: Synthetic polynucleotide"
cagtctgtgttgacgcagccgccctcagtgtctggggccccagggcagagggtcaccatctcctgtagtgggagcagctccaacatcgggacaggttacgatgttcactggtaccagcaacttccaggaacagcccccaaactcctcatctatagtttcaataagcggccctcaggggtccctgaccggttctctgcctccaagtctggcacctcagcctccctggtcatcactgggctccaggctgaggatgaggctgattattactgccagtcctatgacaatttgagtggtccccatgtggttttcggcacagggaccaagctgaccgtccta

SEQ ID NO: 503 - protein, 117 aa, Artificial Sequence
  source: /note="Description of Artificial Sequence: Synthetic polypeptide"
EVQLVETGAEVKKPGASMKVSCKASGYSFTDYYMHWVRQAPGQGLEWMGWINPNSGDTNYAQKFQGRVTMTRDTSITTAYMELSRLRSDDTAVYYCATERYNSGWEWGRGTLVTVSS

SEQ ID NO: 504 - DNA, 351 bp, Artificial Sequence
  source: /note="Description of Artificial Sequence: Synthetic polynucleotide"
gaggtgcagctggtggagactggggctgaggtgaagaagcctggggcctcaatgaaggtctcctgcaaggcttctggatacagcttcaccgactactatatgcactgggtgcgacaggcccctggacaagggcttgagtggatgggatggatcaaccctaatagtggtgacacaaactatgcacagaagtttcagggcagggtcaccatgaccagggacacgtccatcaccacagcctacatggagctgagcaggctgagatctgacgacacggccgtatattactgtgcgacagagaggtataacagtggctgggaatggggccggggcaccctggtcaccgtctcgagt

SEQ ID NO: 505 - protein, 110 aa, Artificial Sequence
  source: /note="Description of Artificial Sequence: Synthetic polypeptide"
QSALTQPASVSGSPGQSITISCTGTSSDVGAYNYVSWYQQHPGKAPKLMIYDVTTRPSGVSNRFSGSKSGNTASLTISGLQAEDEADYYCTSYTRSSTVVFGGGTKLTVL

SEQ ID NO: 506 - DNA, 330 bp, Artificial Sequence
  source: /note="Description of Artificial Sequence: Synthetic polynucleotide"
cagtctgccctgactcagcctgcctccgtgtctgggtctcctggacagtcgatcaccatctcctgcactggaaccagcagtgacgttggtgcttataactatgtctcctggtaccaacaacacccaggcaaagcccccaaactcatgatttatgatgtcactactcggccctcaggggtttctaatcgcttctctggctccaagtctggcaacacggcctccctgaccatctctgggctccaggctgaggacgaggctgattattactgcacctcatatactcgcagcagcactgtggtcttcggcggagggaccaagctgaccgtccta

SEQ ID NO: 507 - protein, 126 aa, Artificial Sequence
  source: /note="Description of Artificial Sequence: Synthetic polypeptide"
KVQLVQSGSELKKPGASVKVSCQASGYTITNHSMNWVRQAPGQGLEWMGWINTNTGNPTYAQGFTGRFVFSLDTSANTATLQITNVQAEDTAVYYCAREGSIDVSGTPYYYGMDAWGQGTTVTVSS

SEQ ID NO: 508 - DNA, 378 bp, Artificial Sequence
  source: /note="Description of Artificial Sequence: Synthetic polynucleotide"
aaggtgcagctggtgcagtctgggtctgagttgaagaagcctggggcctcagtgaaggtttcctgccaggcttctggatacaccatcactaaccatagcatgaattgggtgcgacaggcccctgggcaagggcttgagtggatgggatggatcaacaccaacactgggaaccctacgtatgcccagggcttcacaggacggtttgtcttctccttggacacctctgccaacacggcaactttgcagatcaccaacgtgcaggctgaggacacagccgtctactactgtgcgagagaggggagtatagacgtgtctggaacgccctactactacggaatggacgcctgggggcaagggaccacggtcaccgtctcctca

SEQ ID NO: 509 - protein, 110 aa, Artificial Sequence
  source: /note="Description of Artificial Sequence: Synthetic polypeptide"
QSVLTQPASVSGSPGQSITISCTGTSSDVGGYNYVSWYQQHPGKAPKLMIYEGSERPSGVPNRFSGSKSGNTASLTISGLQAEDEADYYCSSYTTRSTRVFGGGTKLTIL

SEQ ID NO: 510 - DNA, 330 bp, Artificial Sequence
  source: /note="Description of Artificial Sequence: Synthetic polynucleotide"
cagtctgtgctgactcagcctgcctccgtgtctgggtctcctggacagtcgatcaccatctcctgcactggaaccagcagtgacgttggtggttataactatgtctcctggtaccaacaacacccaggcaaagcccccaaactcatgatttatgagggcagtgagcggccctcaggggttcctaatcgcttctctggctccaagtctggcaacacggcctccctgacaatctctgggctccaggctgaggacgaggctgattattactgcagctcatatacaaccaggagcactcgagttttcggcggagggaccaagctgaccatccta

SEQ ID NO: 511 - protein, 124 aa, Artificial Sequence
  source: /note="Description of Artificial Sequence: Synthetic polypeptide"
EVQLLESGGGLVQPGGSLRLSCAASGFTFSSYAMSWVRQAPGKGLEWVSAISGSGGSTYYADSVKGRFTISRDNSKNTLYLQMNSLRAEDTAVYYCARVGAGENYYHYYIMDVWGRGTLVTVSS

SEQ ID NO: 512 - DNA, 372 bp, Artificial Sequence
  source: /note="Description of Artificial Sequence: Synthetic polynucleotide"
gaggtgcagctgttggagtctgggggaggcttggtacagcctggggggtccctgagactctcctgtgcagcctctggattcacctttagcagctatgccatgagctgggtccgccaggctccagggaaggggctggagtgggtctcagctattagtggtagtggtggtagcacatactacgcagactccgtgaagggccggttcaccatctccagagacaattccaagaacacgctgtatctgcaaatgaacagcctgagagccgaggacacggccgtgtattactgtgcgagagtgggggccggggagaactactaccactactacatcatggacgtctggggccggggcaccctggtcaccgtctcgagt

SEQ ID NO: 513 - protein, 108 aa, Artificial Sequence
  source: /note="Description of Artificial Sequence: Synthetic polypeptide"
SSELTQDPAVSVALGQRVRVTCQGDSLRGYYASWYQQKPGQAPVLVIYGENNRPSGIPDRFSGSSSGNTASLTIIGAQAEDEADYYCNSRHSSGNYLVFGGGTKLTVL

SEQ ID NO: 514 - DNA, 324 bp, Artificial Sequence
  source: /note="Description of Artificial Sequence: Synthetic polynucleotide"
tcttctgagctgactcaggaccctgctgtgtctgtggccttgggacagagagtcagggtcacatgccaaggagacagcctcagaggctattatgcaagctggtaccagcagaagccaggacaggcccctgttcttgtcatttatggtgaaaacaaccggccctcagggatcccagaccgattctctggctccagctcaggaaacacagcttccttgaccatcattggggctcaggcggaagatgaggctgactattactgtaactcccggcacagcagtggtaattatctggtgttcggcggagggaccaagctgaccgtccta

SEQ ID NO: 515 - protein, 114 aa, Artificial Sequence
  source: /note="Description of Artificial Sequence: Synthetic polypeptide"
EVQLLESGGGLVQPGGSLRLSCAASGFTFSSYAMSWVRQAPGKGLEWVSAISGSGGSTYYADSVKGRFTISRDNSKNTLYLQMNSLRAEDTAVYYCARGFGDYWGRGTMVTVSS

SEQ ID NO: 516 - DNA, 342 bp, Artificial Sequence
  source: /note="Description of Artificial Sequence: Synthetic polynucleotide"
gaggtgcagctgttggagtctgggggaggcttggtacagcctggggggtccctgagactctcctgtgcagcctctggattcacctttagcagctatgccatgagctgggtccgccaggctccagggaaggggctggagtgggtctcagctattagtggtagtggtggtagcacatactacgcagactccgtgaagggccggttcaccatctccagagacaattccaagaacacgctgtatctgcaaatgaacagcctgagagccgaggacacggccgtgtattactgtgcgagaggctttggtgactactggggccgggggacaatggtcaccgtctcgagt

SEQ ID NO: 517 - protein, 108 aa, Artificial Sequence
  source: /note="Description of Artificial Sequence: Synthetic polypeptide"
SSELTQDPAVSVALGQTVRITCQGDSLRSYYASWYQQKPGQAPVLVIYAKNNRPSGIPDRFSGSDSGNTASLTITGAQAEDEADYYCLSRDSSGNHLVFGGGTKLTVL

SEQ ID NO: 518 - DNA, 324 bp, Artificial Sequence
  source: /note="Description of Artificial Sequence: Synthetic polynucleotide"
tcttctgagctgactcaggaccctgctgtgtctgtggccttgggacagacagtcaggatcacatgccaaggagacagcctcagaagttattatgcaagctggtaccagcagaagccaggacaggcccctgtacttgtcatctatgctaaaaacaaccgaccctcagggatcccagaccgattctctggctccgactcaggaaacacagcttccttgaccatcactggggctcaggcggaagatgaggctgactattactgtctctcccgggacagcagtggtaaccatctggtattcggcggagggaccaagctgaccgtccta

SEQ ID NO: 519 - protein, 117 aa, Artificial Sequence
  source: /note="Description of Artificial Sequence: Synthetic polypeptide"
EVQLLESGGGLVQPGGSLRLSCAASGFTFSSYAMSWVRQAPGKGLEWVSAISGSGGSTYYADSVKGRFTISRDNSKNTLYLQMNSLRAEDTAVYYCARTTADAFDIWGRGTMVTVSS

SEQ ID NO: 520 - DNA, 351 bp, Artificial Sequence
  source: /note="Description of Artificial Sequence: Synthetic polynucleotide"
gaggtgcagctgttggagtctgggggaggcttggtacagcctggggggtccctgagactctcctgtgcagcctctggattcacctttagcagctatgccatgagctgggtccgccaggctccagggaaggggctggagtgggtctcagctattagtggtagtggtggtagcacatactacgcagactccgtgaagggccggttcaccatctccagagacaattccaagaacacgctgtatctgcaaatgaacagcctgagagccgaggacacggccgtgtattactgtgcgagaactacggcagatgcttttgatatctggggcagagggacaatggtcaccgtctcgagt

SEQ ID NO: 521 - protein, 108 aa, Artificial Sequence
  source: /note="Description of Artificial Sequence: Synthetic polypeptide"
SSELTQDPAVSVALGQTVKITCQGDSLRNYYAGWYQQKPGQAPVLVIYGENKRPSGIPDRFSGSNSGNTASLTLTGAQAEDEADYYCNSRDSSSNLVVFGGGTKLTVL

SEQ ID NO: 522 - DNA, 324 bp, Artificial Sequence
  source: /note="Description of Artificial Sequence: Synthetic polynucleotide"
tcttctgagctgactcaggaccctgctgtgtctgtggccttgggacagacagtcaagatcacatgccaaggcgacagcctcagaaactattatgcaggctggtaccagcagaagccaggacaggcccctgtacttgtcatctatggtgaaaacaagcggccctcagggatccctgaccgattctctggctccaactcaggaaacacagcttccttgaccctcactggggctcaggcggaagatgaggctgactattactgtaactcccgggacagcagtagtaacctcgtggtattcggcggagggaccaagctgaccgtccta

SEQ ID NO: 523 - protein, 117 aa, Artificial Sequence
  source: /note="Description of Artificial Sequence: Synthetic polypeptide"
EVQLLESGGGLVQPGGSLRLSCAASGFTFSSYAMSWVRQAPGKGLEWVSAISGSGGSTYYADSVKGRFTISRDNSKNTLYLQMNSLRAEDTAVYYCARTTADAFDIWGRGTTVTVSS

SEQ ID NO: 524 - DNA, 351 bp, Artificial Sequence
  source: /note="Description of Artificial Sequence: Synthetic polynucleotide"
gaggtgcagctgttggagtctgggggaggcttggtacagcctggggggtccctgagactctcctgtgcagcctctggattcacctttagcagctatgccatgagctgggtccgccaggctccagggaaggggctggagtgggtctcagctattagtggtagtggtggtagcacatactacgcagactccgtgaagggccggttcaccatctccagagacaattccaagaacacgctgtatctgcaaatgaacagcctgagagccgaggacacggccgtgtattactgtgcgagaactacggcagatgcttttgatatctgggggagggggaccacggtcaccgtctcgagt

SEQ ID NO: 525 - protein, 107 aa, Artificial Sequence
  source: /note="Description of Artificial Sequence: Synthetic polypeptide"
SSELTQDPAVSVALGQTVSITCQGDSLRNFYASWYLQKPGQAPILVIYGKNKRPSGIPDRVSGSSSEDTASLTITGAQAEDEADYYCNSRDSSGNVVFGGGTKLTVL

SEQ ID NO: 526 - DNA, 320 bp, Artificial Sequence
  source: /note="Description of Artificial Sequence: Synthetic polynucleotide"
cttctgagctgactcaggaccctgctgtgtctgtggccctgggacagacagtcagcatcacatgccagggagacagcctcagaaacttttatgcaagctggtacctgcagaagccaggacaggccccaatacttgtcatctatggtaaaaacaagcggccctctgggatcccagaccgagtctctggctccagctcagaagacacagcttccttgaccatcactggggctcaggcggaagatgaggctgactattactgtaactcccgggacagcagtggtaacgtggtcttcggcggggggaccaagctgaccgtccta

SEQ ID NO: 527 - DNA, 60 bp, Artificial Sequence; identical to SEQ ID NO: 234
  source: /note="Description of Artificial Sequence: Synthetic oligonucleotide"

SEQ ID NO: 528 - protein, 20 aa, Artificial Sequence
  source: /note="Description of Artificial Sequence: Synthetic peptide"
MEAPAQLLFLLLLWLPDTTG

SEQ ID NO: 529 - DNA, 45 bp, Artificial Sequence; identical to SEQ ID NO: 236
  source: /note="Description of Artificial Sequence: Synthetic oligonucleotide"

SEQ ID NO: 530 - protein, 15 aa, Artificial Sequence
  source: /note="Description of Artificial Sequence: Synthetic peptide"
GGGGSGGGGSGGGGS

SEQ ID NO: 531 - DNA, 45 bp, Artificial Sequence; identical to SEQ ID NO: 238
  source: /note="Description of Artificial Sequence: Synthetic oligonucleotide"

SEQ ID NO: 532 - protein, 15 aa, Artificial Sequence
  source: /note="Description of Artificial Sequence: Synthetic peptide"
EPKSSDKTHTCPPCP

SEQ ID NO: 533 - DNA, 1506 bp, Artificial Sequence
  source: /note="Description of Artificial Sequence: Synthetic polynucleotide"
atggaagcaccagcgcagcttctcttcctcctgctactctggctcccagataccaccggtgaagtgcagctggtgcagtctggggctgaggtgaggaagcctggggcctcagtgaaggtttcctgcaggtcatctggatacaccttcaccacctactatttgcactggctacgacaggcccctggacaagggcttgagtggatgggagtaattaaccctagcggcggtgccacagcctacgcgcagagtttccagggcagagtcaccatgaccagggacacggctacgagcacagtctatttggatctgagcagcctgagaactgaagacacggccgtgtattactgtgcgagatccaccccggcggagcagctcgtcccgggcttctggggcaaagggacaatggtcaccgtctcgagtggaggcggcggttcaggcggaggtggctctggcggtggcggaagtgcacttgaaattgtgatgacgcagtctccagccaccctgtctgtgtctccaggggacagagccaccctctcctgcagggccagtcagagtgttagcaccaacgtagcctggtaccagcagaaacctggccaacctcccaggctcctcatctatggtgcatccaccagggcctctggtgtcccagccaggttcagtggcagtgggtctgggacagagttcactctcaccatcagcagtctgcagtctgaagattttgcagtttattactgtcaacagtatggtgactggcctccgatcaccttcggccaagggacacgactggagattaaacgtgacgtacgcgagcccaaatcttctgacaaaactcacacatgcccaccgtgcccagcacctgaactcctgggtggaccgtcagtcttcctcttccccccaaaacccaaggacaccctcatgatctcccggacccctgaggtcacatgcgtggtggtggacgtgagccacgaagaccctgaggtcaagttcaactggtacgtggacggcgtggaggtgcataatgccaagacaaagccgcgggaggagcagtacaacagcacgtaccgtgtggtcagcgtcctcaccgtcctgcaccaggactggctgaatggcaaggagtacaagtgcaaggtctccaacaaagccctcccagcccccatcgagaaaaccatctccaaagccaaagggcagccccgagaaccacaggtgtacaccctgcccccatcccgggatgagctgaccaagaaccaggtcagcctgacctgcctggtcaaaggcttctatccaagcgacatcgccgtggagtgggagagcaatgggcagccggagaacaactacaagaccacgcctcccgtgctggactccgacggctccttcttcctctacagcaagctcaccgtggacaagagcaggtggcagcaggggaacgtcttctcatgctccgtgatgcatgaggctctgcacaaccactacacgcagaagagcctctccctgtctccgggtaaatga

SEQ ID NO: 534 - protein, 501 aa, Artificial Sequence
  source: /note="Description of Artificial Sequence: Synthetic polypeptide"
MEAPAQLLFLLLLWLPDTTGEVQLVQSGAEVRKPGASVKVSCRSSGYTFTTYYLHWLRQAPGQGLEWMGVINPSGGATAYAQSFQGRVTMTRDTATSTVYLDLSSLRTEDTAVYYCARSTPAEQLVPGFWGKGTMVTVSSGGGGSGGGGSGGGGSALEIVMTQSPATLSVSPGDRATLSCRASQSVSTNVAWYQQKPGQPPRLLIYGASTRASGVPARFSGSGSGTEFTLTISSLQSEDFAVYYCQQYGDWPPITFGQGTRLEIKRDVREPKSSDKTHTCPPCPAPELLGGPSVFLFPPKPKDTLMISRTPEVTCVVVDVSHEDPEVKFNWYVDGVEVHNAKTKPREEQYNSTYRVVSVLTVLHQDWLNGKEYKCKVSNKALPAPIEKTISKAKGQPREPQVYTLPPSRDELTKNQVSLTCLVKGFYPSDIAVEWESNGQPENNYKTTPPVLDSDGSFFLYSKLTVDKSRWQQGNVFSCSVMHEALHNHYTQKSLSLSPGK

SEQ ID NO: 535 - DNA, 1515 bp, Artificial Sequence
  source: /note="Description of Artificial Sequence: Synthetic polynucleotide"
atggaagcaccagcgcagcttctcttcctcctgctactctggctcccagataccaccggtcagatgcagctggtgcagtctggggctgaggtgaagaagccaggggcctcagtgaaagtctcctgcaagtcttctggatacaccttcaaggactactatatcaactgggtgcgacaggcccctggacaagggcttgagtgggtgggatggatcaaccctaaaaatggtatcacaaaatattcgcagaattttcagggcagggtctccatgaccacggatacgtccatcagcacagtctacatggacctgagaggtctgacatctgacgacacggccgtttattattgtgcgagagacgcgaaccgccttagggtgggctggttcgacccctggggccaaggaaccctggtcaccgtctcgagtggaggcggcggttcaggcggaggtggctctggcggtggcggaagtgcacaggctgtgctgactcagccgtcctcagtgtctgggtccccagggcagagggtcagcatctcctgcactgggagcagctccaacatcggggcaggttatgatgtacattggtatcaacaacttccaggaacagcccccaaactcctcatctacggtaacatcaatcggccctcaggggtccctgaccgattctctggctccaagtctggcacctcagcctccctggccatcactgggctccaggctgaagatgaggctgattattactgccagtcctatgacagcagcctgagggctgcggtattcggcggagggaccaaggtcaccgtcctaggtgacgtacgcgagcccaaatcttctgacaaaactcacacatgcccaccgtgcccagcacctgaactcctgggtggaccgtcagtcttcctcttccccccaaaacccaaggacaccctcatgatctcccggacccctgaggtcacatgcgtggtggtggacgtgagccacgaagaccctgaggtcaagttcaactggtacgtggacggcgtggaggtgcataatgccaagacaaagccgcgggaggagcagtacaacagcacgtaccgtgtggtcagcgtcctcaccgtcctgcaccaggactggctgaatggcaaggagtacaagtgcaaggtctccaacaaagccctcccagcccccatcgagaaaaccatctccaaagccaaagggcagccccgagaaccacaggtgtacaccctgcccccatcccgggatgagctgaccaagaaccaggtcagcctgacctgcctggtcaaaggcttctatccaagcgacatcgccgtggagtgggagagcaatgggcagccggagaacaactacaagaccacgcctcccgtgctggactccgacggctccttcttcctctacagcaagctcaccgtggacaagagcaggtggcagcaggggaacgtcttctcatgctccgtgatgcatgaggctctgcacaaccactacacgcagaagagcctctccctgtctccgggtaaatga

SEQ ID NO: 536 - protein, 504 aa, Artificial Sequence [sequence omitted]

SEQ ID NO: 537 - DNA, 1509 bp, Artificial Sequence
  source: /note="Description of Artificial Sequence: Synthetic polynucleotide"
atggaagcaccagcgcagcttctcttcctcctgctactctggctcccagataccaccggtgaggtgcagctgttggagtctgggggaggcttggtacagcctggggggtccctgagactctcctgtgcagcctctggattcacctttagcagctatgccatgagctgggtccgccaggctccagggaaggggctggagtgggtctcagctattagtggtagtggtggtagcacatactacgcagactccgtgaagggccggttcaccatctccagagacaattccaagaacacgctgtatctgcaaatgaacagcctgagagccgaggacacggccgtgtattactgtgcgcagggtactcatagcagtggctggtcctttgggtactggggccagggcaccctggtcaccgtctcgagtggaggcggcggttcaggcggaggtggctctggcggtggcggaagtgcactgcctgtgctgactcagcccccctcagcgtctgggacccccgggcagagggtcaccatctcttgttctggaagcagctccaacatcggaagtaaaactgtaaactggtaccagcagctcccaggaacgacccccaaactcctcatctataggaataatcagcggccctcaggggtccctgaccgattctctggctccaagtctggcacctcagcctccctggccatcagtgggctccagtctgaggatgaggctgattattattgtgcagcatgggatgacagcctgaatggtctgatattcggcggagggaccaaggtcaccgtcctaggtgacgtacgcgagcccaaatcttctgacaaaactcacacatgcccaccgtgcccagcacctgaactcctgggtggaccgtcagtcttcctcttccccccaaaacccaaggacaccctcatgatctcccggacccctgaggtcacatgcgtggtggtggacgtgagccacgaagaccctgaggtcaagttcaactggtacgtggacggcgtggaggtgcataatgccaagacaaagccgcgggaggagcagtacaacagcacgtaccgtgtggtcagcgtcctcaccgtcctgcaccaggactggctgaatggcaaggagtacaagtgcaaggtctccaacaaagccctcccagcccccatcgagaaaaccatctccaaagccaaagggcagccccgagaaccacaggtgtacaccctgcccccatcccgggatgagctgaccaagaaccaggtcagcctgacctgcctggtcaaaggcttctatccaagcgacatcgccgtggagtgggagagcaatgggcagccggagaacaactacaagaccacgcctcccgtgctggactccgacggctccttcttcctctacagcaagctcaccgtggacaagagcaggtggcagcaggggaacgtcttctcatgctccgtgatgcatgaggctctgcacaaccactacacgcagaagagcctctccctgtctccgggtaaatga

SEQ ID NO: 538 - protein, 502 aa, Artificial Sequence
  source: /note="Description of Artificial Sequence: Synthetic polypeptide"
MEAPAQLLFLLLLWLPDTTGEVQLLESGGGLVQPGGSLRLSCAASGFTFSSYAMSWVRQAPGKGLEWVSAISGSGGSTYYADSVKGRFTISRDNSKNTLYLQMNSLRAEDTAVYYCAQGTHSSGWSFGYWGQGTLVTVSSGGGGSGGGGSGGGGSALPVLTQPPSASGTPGQRVTISCSGSSSNIGSKTVNWYQQLPGTTPKLLIYRNNQRPSGVPDRFSGSKSGTSASLAISGLQSEDEADYYCAAWDDSLNGLIFGGGTKVTVLGDVREPKSSDKTHTCPPCPAPELLGGPSVFLFPPKPKDTLMISRTPEVTCVVVDVSHEDPEVKFNWYVDGVEVHNAKTKPREEQYNSTYRVVSVLTVLHQDWLNGKEYKCKVSNKALPAPIEKTISKAKGQPREPQVYTLPPSRDELTKNQVSLTCLVKGFYPSDIAVEWESNGQPENNYKTTPPVLDSDGSFFLYSKLTVDKSRWQQGNVFSCSVMHEALHNHYTQKSLSLSPGK

SEQ ID NO: 539 - DNA, 1515 bp, Artificial Sequence
  source: /note="Description of Artificial Sequence: Synthetic polynucleotide"
atggaagcaccagcgcagcttctcttcctcctgctactctggctcccagataccaccggtcaggtacagctgcagcagtcaggggctgaggtgaagaagcctggggcctcagtgaaggtctcctgcaaggtttccggatacaccccccctgatttatccatccactgggtgcgacaggctcctggagaagggcttgagtggatgggacgttttgattttgaagatggtgaaacaatcaacgcacagaagttccagggcagagtcaccatgaccgcggacacatccacaaacacaggctacatggaggtgagcagcctgagatttgaggacacggccgtgtattactgtgcaacaacacttcgattttctggttactactacggtatggacttctggggccgaggaaccctggtcaccgtctcgagtggaggcggcggttcaggcggaggtggctctggcggtggcggaagtgcacaggctgtggtgatccaggagccatcgctctcagtgtcccctggagggacagtcacactcacttgtgccttgagctctggctcagtctccactggttactaccccagctggtaccagcagaccccaggccaggctccacgcacgctcatttacaacacagacactcgctcttctggggtccctggtcgcttctctggctccatccttggggacaaagctgccctcaccatcacgggggcccaggcagatgatgaatctgattattactgtgtgctgtatatgggtagtggcatttgggtgttcggcggagggaccaaggtcaccgtcctaggtgacgtacgcgagcccaaatcttctgacaaaactcacacatgcccaccgtgcccagcacctgaactcctgggtggaccgtcagtcttcctcttccccccaaaacccaaggacaccctcatgatctcccggacccctgaggtcacatgcgtggtggtggacgtgagccacgaagaccctgaggtcaagttcaactggtacgtggacggcgtggaggtgcataatgccaagacaaagccgcgggaggagcagtacaacagcacgtaccgtgtggtcagcgtcctcaccgtcctgcaccaggactggctgaatggcaaggagtacaagtgcaaggtctccaacaaagccctcccagcccccatcgagaaaaccatctccaaagccaaagggcagccccgagaaccacaggtgtacaccctgcccccatcccgggatgagctgaccaagaaccaggtcagcctgacctgcctggtcaaaggcttctatccaagcgacatcgccgtggagtgggagagcaatgggcagccggagaacaactacaagaccacgcctcccgtgctggactccgacggctccttcttcctctacagcaagctcaccgtggacaagagcaggtggcagcaggggaacgtcttctcatgctccgtgatgcatgaggctctgcacaaccactacacgcagaagagcctctccctgtctccgggtaaatga

SEQ ID NO: 540 - protein, 504 aa, Artificial Sequence [sequence omitted]

SEQ ID NO: 541 - DNA, 1521 bp, Artificial Sequence
  source: /note="Description of Artificial Sequence: Synthetic polynucleotide"
atggaagcaccagcgcagcttctcttcctcctgctactctggctcccagataccaccggtcaggtccagctggtacagtctggagcagaggttaaaaagcccggggagtctctgaagatctcctgtaagacttctggatacagctttaccagctattggatcggctgggtgcgccagatgcccgggaaaggcctggagtggatggggatcatctatcctggtgactctgataccagatacagcccgtcttttcaaggccaggtcaccatctcagccgacaagtccatcagcaccgcctacctgcagtggagcagcctgaaggcctcggacaccgccatgtattactgtgcgagacatgacctcccccatcaggagtatcaggacaacggtatggacgtctggggcaaaggaaccctggtcaccgtctcgagtggaggcggcggttcaggcggaggtggctctggcggtggcggaagtgcacagactgtggtgatccaggagccatcgttctcagtgtcccctggagagacagtcacactcacttgtgccttgagctctggctcagtctctagtagttactaccccagctggtaccagcagaccccaggccaggctccacgcgcgctcatctacaacacaaacactcgctcttctggggtccctgatcgcttctctggctccatccttgggaacaaagctgccctcaccatcacgggggcccaggcagatgatgaatctaactattactgtgcgctgtatctgggtagtggcatttgggtgttcggcggagggaccaagctgaccgtcctaggtgacgtacgcgagcccaaatcttctgacaaaactcacacatgcccaccgtgcccagcacctgaactcctgggtggaccgtcagtcttcctcttccccccaaaacccaaggacaccctcatgatctcccggacccctgaggtcacatgcgtggtggtggacgtgagccacgaagaccctgaggtcaagttcaactggtacgtggacggcgtggaggtgcataatgccaagacaaagccgcgggaggagcagtacaacagcacgtaccgtgtggtcagcgtcctcaccgtcctgcaccaggactggctgaatggcaaggagtacaagtgcaaggtctccaacaaagccctcccagcccccatcgagaaaaccatctccaaagccaaagggcagccccgagaaccacaggtgtacaccctgcccccatcccgggatgagctgaccaagaaccaggtcagcctgacctgcctggtcaaaggcttctatccaagcgacatcgccgtggagtgggagagcaatgggcagccggagaacaactacaagaccacgcctcccgtgctggactccgacggctccttcttcctctacagcaagctcaccgtggacaagagcaggtggcagcaggggaacgtcttctcatgctccgtgatgcatgaggctctgcacaaccactacacgcagaagagcctctccctgtctccgggtaaatga

SEQ ID NO: 542 - protein, 506 aa, Artificial Sequence
  source: /note="Description of Artificial Sequence: Synthetic polypeptide"
MEAPAQLLFLLLLWLPDTTGQVQLVQSGAEVKKPGESLKISCKTSGYSFTSYWIGWVRQMPGKGLEWMGIIYPGDSDTRYSPSFQGQVTISADKSISTAYLQWSSLKASDTAMYYCARHDLPHQEYQDNGMDVWGKGTLVTVSSGGGGSGGGGSGGGGSAQTVVIQEPSFSVSPGETVTLTCALSSGSVSSSYYPSWYQQTPGQAPRALIYNTNTRSSGVPDRFSGSILGNKAALTITGAQADDESNYYCALYLGSGIWVFGGGTKLTVLGDVREPKSSDKTHTCPPCPAPELLGGPSVFLFPPKPKDTLMISRTPEVTCVVVDVSHEDPEVKFNWYVDGVEVHNAKTKPREEQYNSTYRVVSVLTVLHQDWLNGKEYKCKVSNKALPAPIEKTISKAKGQPREPQVYTLPPSRDELTKNQVSLTCLVKGFYPSDIAVEWESNGQPENNYKTTPPVLDSDGSFFLYSKLTVDKSRWQQGNVFSCSVMHEALHNHYTQKSLSLSPGK

SEQ ID NO: 543 - DNA, 1515 bp, Artificial Sequence
  source: /note="Description of Artificial Sequence: Synthetic polynucleotide"
atggaagcaccagcgcagcttctcttcctcctgctactctggctcccagataccaccggtgaggtgcagctggtgcagtctggagcagaggtgaagaagcccggggagtctctgaagatctcctgtcagggttctggatacacctttgccagccaatggatcgcctgggtgcgccagatgcccgggcaaggcctggagtggatggggaccatctggcctggtgactctaatcccacatatagcccgtccttccaaggccaggtcaccatctcagccgacaagtccatcagcaccgcctacctgcagtggagcagcctgaaggcctcggacaccgccatctattactgtgcgaggctctacaataactatccctacttctacggtatggacgtctggggccaggggacaatggtcaccgtctcgagtggaggcggcggttcaggcggaggtggctctggcggtggcggaagtgcacagactgtggtgctccaggagccatcgttctcagtgtcccctggagggacagtcacactcacttgtggcttgaggtctggctcagtctctactacttactaccccagctggtaccagcagaccccaggccaggctccacgcacgctcatctacagcacaaacactcgctcttctggggtccctgatcgcttctctggctccatcgtcgggaacaaagctgccctcaccatcacgggggcccaggcagatgatgaatctgattattactgtgcgctatacctgggtagtggcacttgggtgttcggcggagggaccaagctgaccgtcctaggtgacgtacgcgagcccaaatcttctgacaaaactcacacatgcccaccgtgcccagcacctgaactcctgggtggaccgtcagtcttcctcttccccccaaaacccaaggacaccctcatgatctcccggacccctgaggtcacatgcgtggtggtggacgtgagccacgaagaccctgaggtcaagttcaactggtacgtggacggcgtggaggtgcataatgccaagacaaagccgcgggaggagcagtacaacagcacgtaccgtgtggtcagcgtcctcaccgtcctgcaccaggactggctgaatggcaaggagtacaagtgcaaggtctccaacaaagccctcccagcccccatcgagaaaaccatctccaaagccaaagggcagccccgagaaccacaggtgtacaccctgcccccatcccgggatgagctgaccaagaaccaggtcagcctgacctgcctggtcaaaggcttctatccaagcgacatcgccgtggagtgggagagcaatgggcagccggagaacaactacaagaccacgcctcccgtgctggactccgacggctccttcttcctctacagcaagctcaccgtggacaagagcaggtggcagcaggggaacgtcttctcatgctccgtgatgcatgaggctctgcacaaccactacacgcagaagagcctctccctgtctccgggtaaatga

SEQ ID NO: 544 - protein, 504 aa, Artificial Sequence
  source: /note="Description of Artificial Sequence: Synthetic polypeptide"
MEAPAQLLFLLLLWLPDTTGEVQLVQSGAEVKKPGESLKISCQGSGYTFASQWIAWVRQMPGQGLEWMGTIWPGDSNPTYSPSFQGQVTISADKSISTAYLQWSSLKASDTAIYYCARLYNNYPYFYGMDVWGQGTMVTVSSGGGGSGGGGSGGGGSAQTVVLQEPSFSVSPGGTVTLTCGLRSGSVSTTYYPSWYQQTPGQAPRTLIYSTNTRSSGVPDRFSGSIVGNKAALTITGAQADDESDYYCALYLGSGTWVFGGGTKLTVLGDVREPKSSDKTHTCPPCPAPELLGGPSVFLFPPKPKDTLMISRTPEVTCVVVDVSHEDPEVKFNWYVDGVEVHNAKTKPREEQYNSTYRVVSVLTVLHQDWLNGKEYKCKVSNKALPAPIEKTISKAKGQPREPQVYTLPPSRDELTKNQVSLTCLVKGFYPSDIAVEWESNGQPENNYKTTPPVLDSDGSFFLYSKLTVDKSRWQQGNVFSCSVMHEALHNHYTQKSLSLSPGK

SEQ ID NO: 545 - DNA, 1509 bp, Artificial Sequence
  source: /note="Description of Artificial Sequence: Synthetic polynucleotide"
atggaagcaccagcgcagcttctcttcctcctgctactctggctcccagataccaccggtcagatgcagctggtgcagtctggggctgaggtgaagaagcctggggcctcagtgaaggtttcctgcaaggcatctggatacaccttcaccagctactatatacactgggtgcgacaggcccctggacagggccctgagtggatgggaataatcctccctagtggtggcagcaccagctacgcacaggagttccagggcagactctccatgaccagggacacgtccacgagcacagtgtacatggagctgagcgacctgagatctgacgacacggccatttattattgtgcgagagactatgataggagtgcttatcttgatatctggggccgagggacaatggtcaccgtctcgagtggaggcggcggttcaggcggaggtggctctggcggtggcggaagtgcacagtctgtgttgacgcagccgccctcagcgtctgggacccccgggcagagggtcaccatctcttgttctggaagcagctccaacatcggaagaaatactgtaaactggtacaagcagttcccaggaacggcccccaaactcctcatctatagtgataataagcggccctcagggatccctgaccgattctctggctccaagtctggcacctcagcctccctggccatcagtgggctccagtctggggatgaggctgattattactgtgccgcatgggatgacagcctgaatggccatgtggtattcggcggagggaccaagctgaccgtcctaggtgacgtacgcgagcccaaatcttctgacaaaactcacacatgcccaccgtgcccagcacctgaactcctgggtggaccgtcagtcttcctcttccccccaaaacccaaggacaccctcatgatctcccggacccctgaggtcacatgcgtggtggtggacgtgagccacgaagaccctgaggtcaagttcaactggtacgtggacggcgtggaggtgcataatgccaagacaaagccgcgggaggagcagtacaacagcacgtaccgtgtggtcagcgtcctcaccgtcctgcaccaggactggctgaatggcaaggagtacaagtgcaaggtctccaacaaagccctcccagcccccatcgagaaaaccatctccaaagccaaagggcagccccgagaaccacaggtgtacaccctgcccccatcccgggatgagctgaccaagaaccaggtcagcctgacctgcctggtcaaaggcttctatccaagcgacatcgccgtggagtgggagagcaatgggcagccggagaacaactacaagaccacgcctcccgtgctggactccgacggctccttcttcctctacagcaagctcaccgtggacaagagcaggtggcagcaggggaacgtcttctcatgctccgtgatgcatgaggctctgcacaaccactacacgcagaagagcctctccctgtctccgggtaaatga

SEQ ID NO: 546 - protein, 502 aa, Artificial Sequence
  source: /note="Description of Artificial Sequence: Synthetic polypeptide"
MEAPAQLLFLLLLWLPDTTGQMQLVQSGAEVKKPGASVKVSCKASGYTFTSYYIHWVRQAPGQGPEWMGIILPSGGSTSYAQEFQGRLSMTRDTSTSTVYMELSDLRSDDTAIYYCARDYDRSAYLDIWGRGTMVTVSSGGGGSGGGGSGGGGSAQSVLTQPPSASGTPGQRVTISCSGSSSNIGRNTVNWYKQFPGTAPKLLIYSDNKRPSGIPDRFSGSKSGTSASLAISGLQSGDEADYYCAAWDDSLNGHVVFGGGTKLTVLGDVREPKSSDKTHTCPPCPAPELLGGPSVFLFPPKPKDTLMISRTPEVTCVVVDVSHEDPEVKFNWYVDGVEVHNAKTKPREEQYNSTYRVVSVLTVLHQDWLNGKEYKCKVSNKALPAPIEKTISKAKGQPREPQVYTLPPSRDELTKNQVSLTCLVKGFYPSDIAVEWESNGQPENNYKTTPPVLDSDGSFFLYSKLTVDKSRWQQGNVFSCSVMHEALHNHYTQKSLSLSPGK

SEQ ID NO: 547 - DNA, 1518 bp, Artificial Sequence; identical to SEQ ID NO: 206
  source: /note="Description of Artificial Sequence: Synthetic polynucleotide"

SEQ ID NO: 548 - protein, 505 aa, Artificial Sequence; identical to SEQ ID NO: 207
  source: /note="Description of Artificial Sequence: Synthetic polypeptide"

SEQ ID NO: 549 - DNA, 1500 bp, Artificial Sequence
  source: /note="Description of Artificial Sequence: Synthetic polynucleotide"
atggaagcaccagcgcagcttctcttcctcctgctactctggctcccagataccaccggtgaggtgcagctgttggagtctgggggaggcttggtacagcctggggggtccctgagactctcctgtgcagcctctggattcacctttagcagctatgccatgagctgggtccgccaggctccagggaaggggctggagtgggtctcagctattagtggtagtggtggtagcacatactacgcagactccgtgaagggccggttcaccatctccagagacaattccaagaacacgctgtatctgcaaatgaacagcctgagagccgaggacacggccgtgtattactgtgccagagatttaactggcccaaaccactggttcttcgatctctgggggcgggggaccacggtcaccgtctcgagtggaggcggcggttcaggcggaggtggctctggcggtggcggaagtgcacagtctgtgctgactcagccaccctccgtgtccgtgtccccaggacagacagccagcatctcctgctctggacatagattgggcgataagtatgttagttggtatcggcagaggccgggccagtcccctgtgctggtcatctatcaagatgagaagaggtactcagggatctctgagcgattctctggctccaactctgggaacgtagccactctgaccatcaccgggacccaggctatggatgaggctgactatcactgtcaggcgtgggacagcaccactgtggtgttcggcggagggaccaagctgaccgtcctaggtgacgtacgcgagcccaaatcttctgacaaaactcacacatgcccaccgtgcccagcacctgaactcctgggtggaccgtcagtcttcctcttccccccaaaacccaaggacaccctcatgatctcccggacccctgaggtcacatgcgtggtggtggacgtgagccacgaagaccctgaggtcaagttcaactggtacgtggacggcgtggaggtgcataatgccaagacaaagccgcgggaggagcagtacaacagcacgtaccgtgtggtcagcgtcctcaccgtcctgcaccaggactggctgaatggcaaggagtacaagtgcaaggtctccaacaaagccctcccagcccccatcgagaaaaccatctccaaagccaaagggcagccccgagaaccacaggtgtacaccctgcccccatcccgggatgagctgaccaagaaccaggtcagcctgacctgcctggtcaaaggcttctatccaagcgacatcgccgtggagtgggagagcaatgggcagccggagaacaactacaagaccacgcctcccgtgctggactccgacggctccttcttcctctacagcaagctcaccgtggacaagagcaggtggcagcaggggaacgtcttctcatgctccgtgatgcatgaggctctgcacaaccactacacgcagaagagcctctccctgtctccgggtaaatga

SEQ ID NO: 550 - protein, 499 aa, Artificial Sequence
  source: /note="Description of Artificial Sequence: Synthetic polypeptide"
MEAPAQLLFLLLLWLPDTTGEVQLLESGGGLVQPGGSLRLSCAASGFTFSSYAMSWVRQAPGKGLEWVSAISGSGGSTYYADSVKGRFTISRDNSKNTLYLQMNSLRAEDTAVYYCARDLTGPNHWFFDLWGRGTTVTVSSGGGGSGGGGSGGGGSAQSVLTQPPSVSVSPGQTASISCSGHRLGDKYVSWYRQRPGQSPVLVIYQDEKRYSGISERFSGSNSGNVATLTITGTQAMDEADYHCQAWDSTTVVFGGGTKLTVLGDVREPKSSDKTHTCPPCPAPELLGGPSVFLFPPKPKDTLMISRTPEVTCVVVDVSHEDPEVKFNWYVDGVEVHNAKTKPREEQYNSTYRVVSVLTVLHQDWLNGKEYKCKVSNKALPAPIEKTISKAKGQPREPQVYTLPPSRDELTKNQVSLTCLVKGFYPSDIAVEWESNGQPENNYKTTPPVLDSDGSFFLYSKLTVDKSRWQQGNVFSCSVMHEALHNHYTQKSLSLSPGK

SEQ ID NO: 551 - DNA, 1512 bp, Artificial Sequence
  source: /note="Description of Artificial Sequence: Synthetic polynucleotide"
atggaagcaccagcgcagcttctcttcctcctgctactctggctcccagataccaccggtgaggtgcagctgttggagtctgggggaggcttggtacagcctggggggtccctgagactctcctgtgcagcctctggattcacctttagcagctatgccatgagctgggtccgccaggctccagggaaggggctggagtgggtctcagctattagtggtagtggtggtagcacatactacgcagactccgtgaagggccggttcaccatctccagagacaattccaagaacacgctgtatctgcaaatgaacagcctgagagccgaggacacggccgtgtattactgtgcgagaggcagtagagtggggacgatttggggaagccttgacgactggggcaaagggacaatggtcaccgtctcgagtggaggcggcggttcaggcggaggtggctctggcggtggcggaagtgcacttgaaacgacactcacgcagtctccaggcaccctgtctttgtctccaggggaaagagccaccctctcctgcagggccagtcagagtagtagcagcagctacttagcctggtaccagcagaaacctggccaggctcccaggctcctcatctatgctgcatccagcagggccactggcgtcccagacaggttcagtggcagtgggtctgggacagacttcactctcaccatcagcagactggagcctgaagattttgcagtgtattactgtcagcagtatggtagctcacggttcaccttcggccaagggacacgactggagattaaacgtgacgtacgcgagcccaaatcttctgacaaaactcacacatgcccaccgtgcccagcacctgaactcctgggtggaccgtcagtcttcctcttccccccaaaacccaaggacaccctcatgatctcccggacccctgaggtcacatgcgtggtggtggacgtgagccacgaagaccctgaggtcaagttcaactggtacgtggacggcgtggaggtgcataatgccaagacaaagccgcgggaggagcagtacaacagcacgtaccgtgtggtcagcgtcctcaccgtcctgcaccaggactggctgaatggcaaggagtacaagtgcaaggtctccaacaaagccctcccagcccccatcgagaaaaccatctccaaagccaaagggcagccccgagaaccacaggtgtacaccctgcccccatcccgggatgagctgaccaagaaccaggtcagcctgacctgcctggtcaaaggcttctatccaagcgacatcgccgtggagtgggagagcaatgggcagccggagaacaactacaagaccacgcctcccgtgctggactccgacggctccttcttcctctacagcaagctcaccgtggacaagagcaggtggcagcaggggaacgtcttctcatgctccgtgatgcatgaggctctgcacaaccactacacgcagaagagcctctccctgtctccgggtaaatga

SEQ ID NO: 552 - protein, 503 aa, Artificial Sequence [sequence omitted]

SEQ ID NO: 553 - DNA, 1518 bp, Artificial Sequence
  source: /note="Description of Artificial Sequence: Synthetic polynucleotide"
atggaagcaccagcgcagcttctcttcctcctgctactctggctcccagataccaccggtcaggtgcagctggtgcagtctggagcagaggtgaaaaagcccggggagtctctgaagatctcctgtaagggttctggatacagttttgccaactacgggataggctgggtgcgccagatgcccgggaaaggcctggagtggatgggggtcatctatcctggtgactctgatatcagatacagcccgtccttccaaggccaggtcatcttctcagccgacaggtccatcagcaccgcctacctgcagtggagcagcctgaaggcctcggacaccgccatgtattattgtgcgagacatctctcgtggctggtcggggggaactacggtatggacgtctggggcaaagggacaatggtcaccgtctcgagtggaggcggcggttcaggcggaggtggctctggcggtggcggaagtgcacagactgtggtgatccaggagccatcgttctcagtgtcccctggagggacagtcacactcacttgtggcttgacctctggctcagtctctactagtcactaccccagctggtaccagcagaccccaggccaggctccacgcacgctcatctacagcacaaacactcgctcttctggggtccctggtcgcttctctggctccatccttgggaacaaagctgccctcaccatcacgggggcccaggcagacgatgaatctgattattattgtgtgctgtatatgggtggtggcatttcggtgttcggcggagggaccaaggtcaccgtcctaggtgacgtacgcgagcccaaatcttctgacaaaactcacacatgcccaccgtgcccagcacctgaactcctgggtggaccgtcagtcttcctcttccccccaaaacccaaggacaccctcatgatctcccggacccctgaggtcacatgcgtggtggtggacgtgagccacgaagaccctgaggtcaagttcaactggtacgtggacggcgtggaggtgcataatgccaagacaaagccgcgggaggagcagtacaacagcacgtaccgtgtggtcagcgtcctcaccgtcctgcaccaggactggctgaatggcaaggagtacaagtgcaaggtctccaacaaagccctcccagcccccatcgagaaaaccatctccaaagccaaagggcagccccgagaaccacaggtgtacaccctgcccccatcccgggatgagctgaccaagaaccaggtcagcctgacctgcctggtcaaaggcttctatccaagcgacatcgccgtggagtgggagagcaatgggcagccggagaacaactacaagaccacgcctcccgtgctggactccgacggctccttcttcctctacagcaagctcaccgtggacaagagcaggtggcagcaggggaacgtcttctcatgctccgtgatgcatgaggctctgcacaaccactacacgcagaagagcctctccctgtctccgggtaaatga

SEQ ID NO: 554 - protein, 505 aa, Artificial Sequence
  source: /note="Description of Artificial Sequence: Synthetic polypeptide"
MEAPAQLLFLLLLWLPDTTGQVQLVQSGAEVKKPGESLKISCKGSGYSFANYGIGWVRQMPGKGLEWMGVIYPGDSDIRYSPSFQGQVIFSADRSISTAYLQWSSLKASDTAMYYCARHLSWLVGGNYGMDVWGKGTMVTVSSGGGGSGGGGSGGGGSAQTVVIQEPSFSVSPGGTVTLTCGLTSGSVSTSHYPSWYQQTPGQAPRTLIYSTNTRSSGVPGRFSGSILGNKAALTITGAQADDESDYYCVLYMGGGISVFGGGTKVTVLGDVREPKSSDKTHTCPPCPAPELLGGPSVFLFPPKPKDTLMISRTPEVTCVVVDVSHEDPEVKFNWYVDGVEVHNAKTKPREEQYNSTYRVVSVLTVLHQDWLNGKEYKCKVSNKALPAPIEKTISKAKGQPREPQVYTLPPSRDELTKNQVSLTCLVKGFYPSDIAVEWESNGQPENNYKTTPPVLDSDGSFFLYSKLTVDKSRWQQGNVFSCSVMHEALHNHYTQKSLSLSPGK

SEQ ID NO: 555 - DNA, 1515 bp, Artificial Sequence
  source: /note="Description of Artificial Sequence: Synthetic polynucleotide"
atggaagcaccagcgcagcttctcttcctcctgctactctggctcccagataccaccggtgaggtgcagctggtgcagtctggggcagaggtgaaacagcccggggagtctctgaagatctcctgtaagggttctggatacagctttagcaactactggatcggctgggtgcgccagatgcccgggaaaggcctggagtggatggggatcatctatcctgatgactctgataccagatacagcccgtccttccaaggccaggtcaccatctcagccgacaggtccatcagcaccgcctacctgcagtggagcagcctgaaggcctcggacaccgccacgtattactgtgcgagaggaaatgttataaatggaaataccaatgcttttgatatctgggggcgggggaccacggtcaccgtctcgagtggaggcggcggttcaggcggaggtggctctggcggtggcggaagtgcacaggctgtggtgatccaggagccatcgttctcagtgtcccctggagggacagtcacactcacttgtggcttgagctctggctcagtctctactggttactaccccagctggtaccagcagaccccaggccaggctccacgcacgctcatctacaacacaaacagtcgctcttctggggtccctgatcgcttctctggctccatccttgggaacaaagctgccctcaccatcacgggggcccaggcagatgatgaatctgattattactgtgtgctgtatatgggtagtggcatttcggtattcggcggagggaccaagctgaccgtcctaggtgacgtacgcgagcccaaatcttctgacaaaactcacacatgcccaccgtgcccagcacctgaactcctgggtggaccgtcagtcttcctcttccccccaaaacccaaggacaccctcatgatctcccggacccctgaggtcacatgcgtggtggtggacgtgagccacgaagaccctgaggtcaagttcaactggtacgtggacggcgtggaggtgcataatgccaagacaaagccgcgggaggagcagtacaacagcacgtaccgtgtggtcagcgtcctcaccgtcctgcaccaggactggctgaatggcaaggagtacaagtgcaaggtctccaacaaagccctcccagcccccatcgagaaaaccatctccaaagccaaagggcagccccgagaaccacaggtgtacaccctgcccccatcccgggatgagctgaccaagaaccaggtcagcctgacctgcctggtcaaaggcttctatccaagcgacatcgccgtggagtgggagagcaatgggcagccggagaacaactacaagaccacgcctcccgtgctggactccgacggctccttcttcctctacagcaagctcaccgtggacaagagcaggtggcagcaggggaacgtcttctcatgctccgtgatgcatgaggctctgcacaaccactacacgcagaagagcctctccctgtctccgggtaaatga

SEQ ID NO: 556 - protein, 504 aa, Artificial Sequence
  source: /note="Description of Artificial Sequence: Synthetic polypeptide"
MEAPAQLLFLLLLWLPDTTGEVQLVQSGAEVKQPGESLKISCKGSGYSFSNYWIGWVRQMPGKGLEWMGIIYPDDSDTRYSPSFQGQVTISADRSISTAYLQWSSLKASDTATYYCARGNVINGNTNAFDIWGRGTTVTVSSGGGGSGGGGSGGGGSAQAVVIQEPSFSVSPGGTVTLTCGLSSGSVSTGYYPSWYQQTPGQAPRTLIYNTNSRSSGVPDRFSGSILGNKAALTITGAQADDESDYYCVLYMGSGISVFGGGTKLTVLGDVREPKSSDKTHTCPPCPAPELLGGPSVFLFPPKPKDTLMISRTPEVTCVVVDVSHEDPEVKFNWYVDGVEVHNAKTKPREEQYNSTYRVVSVLTVLHQDWLNGKEYKCKVSNKALPAPIEKTISKAKGQPREPQVYTLPPSRDELTKNQVSLTCLVKGFYPSDIAVEWESNGQPENNYKTTPPVLDSDGSFFLYSKLTVDKSRWQQGNVFSCSVMHEALHNHYTQKSLSLSPGK

SEQ ID NO: 557 - DNA, 1527 bp, Artificial Sequence
  source: /note="Description of Artificial Sequence: Synthetic polynucleotide"
atggaagcaccagcgcagcttctcttcctcctgctactctggctcccagataccaccggtgaggtgctgctgttggagtctgggggaggcttggtacagcctggggggtccctgagactctcctgtgcagcctctggattcacctttagcagctatgccatgagctgggtccgccaggctccagggaaggggctggagtgggtctcagctatcagtggtagtggtggtagcacatactacgcagactccgcgaagggccggttcaccatctccagagacaattccaagaacacgctgtatctgcaaatgaacagcctgagagccgaggacacggccgtgtattactgtgcgagggacagggtctctaactggaactactacggccaggacagctactttgactactggggccaagggacaatggtcaccgtctcgagtggaggcggcggttcaggcggaggtggctctggcggtggcggaagtgcacaggctgtgctgactcagccaccctcagcgtctgggacccccgggcagagggtcaccatctcttgttctggaagcagctccaacatcggaagtaattatgtatactggtaccagcaactcccaggaacggcccccaaagtcctcatctataggaataatcagcggccctcaggggtccctgaccgattctctggctccaagtctggcacctcagcgtccctggccatcagtgggctccggtccgaggatgaggctgattattactgtgcatcatgggatggcagcctgagtggtccggtgttcggcggagggaccaagctgaccgtcctaggtgacgtacgcgagcccaaatcttctgacaaaactcacacatgcccaccgtgcccagcacctgaactcctgggtggaccgtcagtcttcctcttccccccaaaacccaaggacaccctcatgatctcccggacccctgaggtcacatgcgtggtggtggacgtgagccacgaagaccctgaggtcaagttcaactggtacgtggacggcgtggaggtgcataatgccaagacaaagccgcgggaggagcagtacaacagcacgtaccgtgtggtcagcgtcctcaccgtcctgcaccaggactggctgaatggcaaggagtacaagtgcaaggtctccaacaaagccctcccagcccccatcgagaaaaccatctccaaagccaaagggcagccccgagaaccacaggtgtacaccctgcccccatcccgggatgagctgaccaagaaccaggtcagcctgacctgcctggtcaaaggcttctatccaagcgacatcgccgtggagtgggagagcaatgggcagccggagaacaactacaagaccacgcctcccgtgctggactccgacggctccttcttcctctacagcaagctcaccgtggacaagagcaggtggcagcaggggaacgtcttctcatgctccgtgatgcatgaggctctgcacaaccactacacgcagaagagcctctccctgtctccgggtaaatga

SEQ ID NO: 558 - protein, 508 aa, Artificial Sequence
  source: /note="Description of Artificial Sequence: Synthetic polypeptide"
MEAPAQLLFLLLLWLPDTTGEVLLLESGGGLVQPGGSLRLSCAASGFTFSSYAMSWVRQAPGKGLEWVSAISGSGGSTYYADSAKGRFTISRDNSKNTLYLQMNSLRAEDTAVYYCARDRVSNWNYYGQDSYFDYWGQGTMVTVSSGGGGSGGGGSGGGGSAQAVLTQPPSASGTPGQRVTISCSGSSSNIGSNYVYWYQQLPGTAPKVLIYRNNQRPSGVPDRFSGSKSGTSASLAISGLRSEDEADYYCASWDGSLSGPVFGGGTKLTVLGDVREPKSSDKTHTCPPCPAPELLGGPSVFLFPPKPKDTLMISRTPEVTCVVVDVSHEDPEVKFNWYVDGVEVHNAKTKPREEQYNSTYRVVSVLTVLHQDWLNGKEYKCKVSNKALPAPIEKTISKAKGQPREPQVYTLPPSRDELTKNQVSLTCLVKGFYPSDIAVEWESNGQPENNYKTTPPVLDSDGSFFLYSKLTVDKSRWQQGNVFSCSVMHEALHNHYTQKSLSLSPGK

SEQ ID NO: 559 - DNA, 1515 bp, Artificial Sequence
  source: /note="Description of Artificial Sequence: Synthetic polynucleotide"
atggaagcaccagcgcagcttctcttcctcctgctactctggctcccagataccaccggtgaggtgcagctggtgcagtctgggggaggcttggtacagcctgggggatccctgagactctcctgtgcagcctctggattcacctttagcagctatcccatgcactgggtccgccaggctccaggcaaggggctggagtgggtggcagttgtatcgttcgatggatctaagaaatactctgcagactccgtgaagggccgattcaccatctccagagacatctccaagaacacgctgtatctgcaaatgaacagcctgagagctgaggacacggctgtatattactgtgcgaaagatcgctatgattcggggactttctactacggcatggacgtctggggccggggcaccctggtcaccgtctcgagtggtggaggcggttcaggcggaggtggcagcggcggtggcggatcgcagtctgccctgactcagcctgcctccgtgtctggatctcgtggacagtcgatcaccatctcctgcactggaaccactggtgacgttggtggttatgactatgtctcctggtaccaacagcacccaggcagagcccccaaactcctcatctatggtaacagcaatcggccctcaggggtccctgatcgcttctctgcctccaagtccggcaatacggcctccctgaccatctctggactccaggctgaggatgaggctgattatttctgcagcacatatgcaccccccggtattattatgttcggcggagggaccaagctgaccgtcctaggtgacgtacgcgagcccaaatcttctgacaaaactcacacatgcccaccgtgcccagcacctgaactcctgggtggaccgtcagtcttcctcttccccccaaaacccaaggacaccctcatgatctcccggacccctgaggtcacatgcgtggtggtggacgtgagccacgaagaccctgaggtcaagttcaactggtacgtggacggcgtggaggtgcataatgccaagacaaagccgcgggaggagcagtacaacagcacgtaccgtgtggtcagcgtcctcaccgtcctgcaccaggactggctgaatggcaaggagtacaagtgcaaggtctccaacaaagccctcccagcccccatcgagaaaaccatctccaaagccaaagggcagccccgagaaccacaggtgtacaccctgcccccatcccgggatgagctgaccaagaaccaggtcagcctgacctgcctggtcaaaggcttctatccaagcgacatcgccgtggagtgggagagcaatgggcagccggagaacaactacaagaccacgcctcccgtgctggactccgacggctccttcttcctctacagcaagctcaccgtggacaagagcaggtggcagcaggggaacgtcttctcatgctccgtgatgcatgaggctctgcacaaccactacacgcagaagagcctctccctgtctccgggtaaatga

SEQ ID NO: 560 - protein, 504 aa, Artificial Sequence
  source: /note="Description of Artificial Sequence: Synthetic polypeptide"
MEAPAQLLFLLLLWLPDTTGEVQLVQSGGGLVQPGGSLRLSCAASGFTFSSYPMHWVRQAPGKGLEWVAVVSFDGSKKYSADSVKGRFTISRDISKNTLYLQMNSLRAEDTAVYYCAKDRYDSGTFYYGMDVWGRGTLVTVSSGGGGSGGGGSGGGGSQSALTQPASVSGSRGQSITISCTGTTGDVGGYDYVSWYQQHPGRAPKLLIYGNSNRPSGVPDRFSASKSGNTASLTISGLQAEDEADYFCSTYAPPGIIMFGGGTKLTVLGDVREPKSSDKTHTCPPCPAPELLGGPSVFLFPPKPKDTLMISRTPEVTCVVVDVSHEDPEVKFNWYVDGVEVHNAKTKPREEQYNSTYRVVSVLTVLHQDWLNGKEYKCKVSNKALPAPIEKTISKAKGQPREPQVYTLPPSRDELTKNQVSLTCLVKGFYPSDIAVEWESNGQPENNYKTTPPVLDSDGSFFLYSKLTVDKSRWQQGNVFSCSVMHEALHNHYTQKSLSLSPGK

SEQ ID NO: 561 - DNA, 1494 bp, Artificial Sequence
  source: /note="Description of Artificial Sequence: Synthetic polynucleotide"
atggaagcaccagcgcagcttctcttcctcctgctactctggctcccagataccaccggtgaggtgcagctggtggagtctgggggaggcttggtacagcctggggggtccctgagactctcctgtgctgcctctggattcacctttgacagctatgccatgagctgggtccgccaggctccagggaaggggctggagtgggtctcaattattagtggtagagatggttacacatactacacagactccgtgaagggtcggttcaccatctccagagacaattccaagaacacggtgtatctgcaaatgaacagcctgagagccgaggacacgggtgtgtattattgtgcgagaaatggggagtggcccggaatcttagactactggggcagggggacaatggtcaccgtctcctcaggtggaggcggttcaggcggaggtggcagcggcggtggcggatcggacatccagatgacccagtctccttccaccctgtctgcatctattggagacagagtcaccatcacctgccgggccagtgagggtatttatcactggttggcctggtatcagcagaagccagggaaagcccctaaactcctgatctataaggcctctagtttagccagtggggccccatcaaggttcagcggcagtggatctgggacagatttcactctcaccatcagcagcctgcagcctgatgattttgcaacttattactgccaacaatatagtaattatccgctcactttcggcggagggaccaagctggagatcaaacgtgacgtacgcgagcccaaatcttctgacaaaactcacacatgcccaccgtgcccagcacctgaactcctgggtggaccgtcagtcttcctcttccccccaaaacccaaggacaccctcatgatctcccggacccctgaggtcacatgcgtggtggtggacgtgagccacgaagaccctgaggtcaagttcaactggtacgtggacggcgtggaggtgcataatgccaagacaaagccgcgggaggagcagtacaacagcacgtaccgtgtggtcagcgtcctcaccgtcctgcaccaggactggctgaatggcaaggagtacaagtgcaaggtctccaacaaagccctcccagcccccatcgagaaaaccatctccaaagccaaagggcagccccgagaaccacaggtgtacaccctgcccccatcccgggatgagctgaccaagaaccaggtcagcctgacctgcctggtcaaaggcttctatccaagcgacatcgccgtggagtgggagagcaatgggcagccggagaacaactacaagaccacgcctcccgtgctggactccgacggctccttcttcctctacagcaagctcaccgtggacaagagcaggtggcagcaggggaacgtcttctcatgctccgtgatgcatgaggctctgcacaaccactacacgcagaagagcctctccctgtctccgggtaaatga

SEQ ID NO: 562 - protein, 497 aa, Artificial Sequence
  source: /note="Description of Artificial Sequence: Synthetic polypeptide"
MEAPAQLLFLLLLWLPDTTGEVQLVESGGGLVQPGGSLRLSCAASGFTFDSYAMSWVRQAPGKGLEWVSIISGRDGYTYYTDSVKGRFTISRDNSKNTVYLQMNSLRAEDTGVYYCARNGEWPGILDYWGRGTMVTVSSGGGGSGGGGSGGGGSDIQMTQSPSTLSASIGDRVTITCRASEGIYHWLAWYQQKPGKAPKLLIYKASSLASGAPSRFSGSGSGTDFTLTISSLQPDDFATYYCQQYSNYPLTFGGGTKLEIKRDVREPKSSDKTHTCPPCPAPELLGGPSVFLFPPKPKDTLMISRTPEVTCVVVDVSHEDPEVKFNWYVDGVEVHNAKTKPREEQYNSTYRVVSVLTVLHQDWLNGKEYKCKVSNKALPAPIEKTISKAKGQPREPQVYTLPPSRDELTKNQVSLTCLVKGFYPSDIAVEWESNGQPENNYKTTPPVLDSDGSFFLYSKLTVDKSRWQQGNVFSCSVMHEALHNHYTQKSLSLSPGK

SEQ ID NO: 563 - DNA, 1500 bp, Artificial Sequence
  source: /note="Description of Artificial Sequence: Synthetic polynucleotide"
atggaagcaccagcgcagcttctcttcctcctgctactctggctcccagataccaccggtcaggtgcagctggtggagtctgggggaggcgtggtccagcctgggaggtccctgagactctcctgtgcagcctctggattcaccttcagtagctatgctatgaactgggtccgccaggctccaggcaaggggctggagtgggtggcaactatatcatatgatggaagcaataaatactacgcagactccgtgaagggccgattcaccatctccagagacaattccaagaacacgctgtatctgcaaatgaacagcctgagagccgaggacacggctgtgtattactgtgcgagaccggccccgtatagcagctccggcgcttttgatatctggggccaaggcaccctggtcaccgtctcttcaggtggaggcggttcaggcggaggtggcagcggcggtggcggatcggacatccagatgacccagtctccttccaccctgtctgcatctattggagacagagtcaccatcacctgccgggccagtgagggtatttatcactggttggcctggtatcagcagaagccagggaaagcccctaaactcctgacctataaggcctctagtttagccagtggggccccatcaaggttcagcggcagtggatctgggacagatttcactctcaccatcagcagcctgcagcctgatgattttgcaacttattactgccaacaatatagtaattatccgctcactttcggcggagggaccaagctggagatcaaacgtgacgtacgcgagcccaaatcttctgacaaaactcacacatgcccaccgtgcccagcacctgaactcctgggtggaccgtcagtcttcctcttccccccaaaacccaaggacaccctcatgatctcccggacccctgaggtcacatgcgtggtggtggacgtgagccacgaagaccctgaggtcaagttcaactggtacgtggacggcgtggaggtgcataatgccaagacaaagccgcgggaggagcagtacaacagcacgtaccgtgtggtcagcgtcctcaccgtcctgcaccaggactggctgaatggcaaggagtacaagtgcaaggtctccaacaaagccctcccagcccccatcgagaaaaccatctccaaagccaaagggcagccccgagaaccacaggtgtacaccctgcccccatcccgggatgagctgaccaagaaccaggtcagcctgacctgcctggtcaaaggcttctatccaagcgacatcgccgtggagtgggagagcaatgggcagccggagaacaactacaagaccacgcctcccgtgctggactccgacggctccttcttcctctacagcaagctcaccgtggacaagagcaggtggcagcaggggaacgtcttctcatgctccgtgatgcatgaggctctgcacaaccactacacgcagaagagcctctccctgtctccgggtaaatga

SEQ ID NO: 564 - protein, 499 aa, Artificial Sequence
  source: /note="Description of Artificial Sequence: Synthetic polypeptide"
MEAPAQLLFLLLLWLPDTTGQVQLVESGGGVVQPGRSLRLSCAASGFTFSSYAMNWVRQAPGKGLEWVATISYDGSNKYYADSVKGRFTISRDNSKNTLYLQMNSLRAEDTAVYYCARPAPYSSSGAFDIWGQGTLVTVSSGGGGSGGGGSGGGGSDIQMTQSPSTLSASIGDRVTITCRASEGIYHWLAWYQQKPGKAPKLLTYKASSLASGAPSRFSGSGSGTDFTLTISSLQPDDFATYYCQQYSNYPLTFGGGTKLEIKRDVREPKSSDKTHTCPPCPAPELLGGPSVFLFPPKPKDTLMISRTPEVTCVVVDVSHEDPEVKFNWYVDGVEVHNAKTKPREEQYNSTYRVVSVLTVLHQDWLNGKEYKCKVSNKALPAPIEKTISKAKGQPREPQVYTLPPSRDELTKNQVSLTCLVKGFYPSDIAVEWESNGQPENNYKTTPPVLDSDGSFFLYSKLTVDKSRWQQGNVFSCSVMHEALHNHYTQKSLSLSPGK

SEQ ID NO: 565 - DNA, 1491 bp, Artificial Sequence
  source: /note="Description of Artificial Sequence: Synthetic polynucleotide"
atggaagcaccagcgcagcttctcttcctcctgctactctggctcccagataccaccggtcagatgcagctggtgcagtctggggcagaggtgaaaaagcccggggagtctctgaagatgtcctgtaagggttctggatacagctttaccagctactggatcggctgggtgcgccagatgcccgggaaaggcctggagtggatggggatcatctatcctggtaactccgataccagatacaacccgtccttcgaaggccaggtcaccatctcagccgacaagtccatcaacaccgccttcctgcagtggaacagcctgaaggcctcggacaccgccatatattattgtgcgcgggctccctgggtgggtgcttttgatacttggggccaggggacaatggtcaccgtctcttcaggtggaggcggttcaggcggaggtggcagcggcggtggcggatcggacatcgtgatgacccagtctccttccaccctgtctgcatctgtaggagacagagtcaccatcacttgccgggccagtcagggtattagtagctggttggcctggtatcagcagaaaccagggagagcccctaaggtcttgatctataaggcatctactttagaaagtggggtcccatcaaggttcagcggcagtggatctgggacagatttcactctcaccatcagcagtctgcaacctgaagattttgcaacttactactgtcaacagagttacagtaccccgtggacgttcggccaagggaccaagctggagatcaaacgtgacgtacgcgagcccaaatcttctgacaaaactcacacatgcccaccgtgcccagcacctgaactcctgggtggaccgtcagtcttcctcttccccccaaaacccaaggacaccctcatgatctcccggacccctgaggtcacatgcgtggtggtggacgtgagccacgaagaccctgaggtcaagttcaactggtacgtggacggcgtggaggtgcataatgccaagacaaagccgcgggaggagcagtacaacagcacgtaccgtgtggtcagcgtcctcaccgtcctgcaccaggactggctgaatggcaaggagtacaagtgcaaggtctccaacaaagccctcccagcccccatcgagaaaaccatctccaaagccaaagggcagccccgagaaccacaggtgtacaccctgcccccatcccgggatgagctgaccaagaaccaggtcagcctgacctgcctggtcaaaggcttctatccaagcgacatcgccgtggagtgggagagcaatgggcagccggagaacaactacaagaccacgcctcccgtgctggactccgacggctccttcttcctctacagcaagctcaccgtggacaagagcaggtggcagcaggggaacgtcttctcatgctccgtgatgcatgaggctctgcacaaccactacacgcagaagagcctctccctgtctccgggtaaatga

SEQ ID NO: 566 - protein, 496 aa, Artificial Sequence
  source: /note="Description of Artificial Sequence: Synthetic polypeptide"
MEAPAQLLFLLLLWLPDTTGQMQLVQSGAEVKKPGESLKMSCKGSGYSFTSYWIGWVRQMPGKGLEWMGIIYPGNSDTRYNPSFEGQVTISADKSINTAFLQWNSLKASDTAIYYCARAPWVGAFDTWGQGTMVTVSSGGGGSGGGGSGGGGSDIVMTQSPSTLSASVGDRVTITCRASQGISSWLAWYQQKPGRAPKVLIYKASTLESGVPSRFSGSGSGTDFTLTISSLQPEDFATYYCQQSYSTPWTFGQGTKLEIKRDVREPKSSDKTHTCPPCPAPELLGGPSVFLFPPKPKDTLMISRTPEVTCVVVDVSHEDPEVKFNWYVDGVEVHNAKTKPREEQYNSTYRVVSVLTVLHQDWLNGKEYKCKVSNKALPAPIEKTISKAKGQPREPQVYTLPPSRDELTKNQVSLTCLVKGFYPSDIAVEWESNGQPENNYKTTPPVLDSDGSFFLYSKLTVDKSRWQQGNVFSCSVMHEALHNHYTQKSLSLSPGK

SEQ ID NO: 567 - DNA, 1515 bp, Artificial Sequence
  source: /note="Description of Artificial Sequence: Synthetic polynucleotide"
atggaagcaccagcgcagcttctcttcctcctgctactctggctcccagataccaccggtcaggtgcagctgcaggagtcgggcccaggactggtggagccttcggagaccctgtccctcacctgcagtgtctctggcggctccatcagcagcagtagttcctcttggggctggatccgccagcccccagggaaggggctggagtggattgggagtatctattacagtggagaaacctattataatccgtccctcaagaggcgtgtcaccatatccacagacacgtccaagaaccagttgtccctggagctggcctctgtgaccgccgcagacacggctgtatattactgtgcgaggcaagtcaccagttatggttctgactactttgactactggggcaaaggaaccctggtcaccgtctcgagtggaggcggcggttcaggcggaggtggctctggcggtggcggaagtgcacaggctgtggtgatccaggagccatcgttctcagtgtcccctggagggacagtcacacttacttgtggcttgagctctggctcagtctcttctaattactaccccagctggtaccagcagaccccaggccagactccacgcacgctcatctacaacacaaacactcgctcttctggggtccctgatcgcttctctggctccatccttgggaacaaagctgccctcaccatcacgggggcccaggcagatgatgaatctgattattactgtgtgttgtatatgggtagtggcattcgcgtgttcggcggagggaccaaggtcaccgtcctaggtgacgtacgcgagcccaaatcttctgacaaaactcacacatgcccaccgtgcccagcacctgaactcctgggtggaccgtcagtcttcctcttccccccaaaacccaaggacaccctcatgatctcccggacccctgaggtcacatgcgtggtggtggacgtgagccacgaagaccctgaggtcaagttcaactggtacgtggacggcgtggaggtgcataatgccaagacaaagccgcgggaggagcagtacaacagcacgtaccgtgtggtcagcgtcctcaccgtcctgcaccaggactggctgaatggcaaggagtacaagtgcaaggtctccaacaaagccctcccagcccccatcgagaaaaccatctccaaagccaaagggcagccccgagaaccacaggtgtacaccctgcccccatcccgggatgagctgaccaagaaccaggtcagcctgacctgcctggtcaaaggcttctatccaagcgacatcgccgtggagtgggagagcaatgggcagccggagaacaactacaagaccacgcctcccgtgctggactccgacggctccttcttcctctacagcaagctcaccgtggacaagagcaggtggcagcaggggaacgtcttctcatgctccgtgatgcatgaggctctgcacaaccactacacgcagaagagcctctccctgtctccgggtaaatga

SEQ ID NO: 568 - protein, 504 aa, Artificial Sequence [sequence omitted]

SEQ ID NO: 569 - DNA, 1527 bp, Artificial Sequence
  source: /note="Description of Artificial Sequence: Synthetic polynucleotide"
atggaagcaccagcgcagcttctcttcctcctgctactctggctcccagataccaccggtgaggtccagctggtgcagtctggggcagaggtgaaaaagtccggggagtctctgaagatctcctgtaagggttctggatacagctttaccagtaattggatcggctgggtgcgccagatgcccgggaaaggcctggagtggatggggatcatctatcctggtgactctgataccagatacagcccgtccttccaaggccaggtcaccatctcagccgacaagtccgtcagcaccgcctacctgcagtggagcagcctgaaggcctcggacaccgccatgtattattgtgcgagaatgctgacggactgtagtagtaccagctgctattcagccggtatggacgtctggggcaaaggcaccctggtcaccgtctcgagtggaggcggcggttcaggcggaggtggctctggcggtggcggaagtgcacaggctgtggtgatccaggagccatcgttctcagtgtcccctggagggacagtcacactcacttgtggcttgagttctggctcagtctctcctagttactaccccagctggtaccagcagaccccaggccaggctccacgcacactcatctacagcacaaacactcgctcttctggggtccctgatcgcttctctggctccatccttgggaacaaagctgccctcaccatcacgggggcccaggcagatgatgaatctgattattactgtgtgctgtatatgggtagtggctcttgggtgttcggcggagggaccaagctgaccgtcctaggtgacgtacgcgagcccaaatcttctgacaaaactcacacatgcccaccgtgcccagcacctgaactcctgggtggaccgtcagtcttcctcttccccccaaaacccaaggacaccctcatgatctcccggacccctgaggtcacatgcgtggtggtggacgtgagccacgaagaccctgaggtcaagttcaactggtacgtggacggcgtggaggtgcataatgccaagacaaagccgcgggaggagcagtacaacagcacgtaccgtgtggtcagcgtcctcaccgtcctgcaccaggactggctgaatggcaaggagtacaagtgcaaggtctccaacaaagccctcccagcccccatcgagaaaaccatctccaaagccaaagggcagccccgagaaccacaggtgtacaccctgcccccatcccgggatgagctgaccaagaaccaggtcagcctgacctgcctggtcaaaggcttctatccaagcgacatcgccgtggagtgggagagcaatgggcagccggagaacaactacaagaccacgcctcccgtgctggactccgacggctccttcttcctctacagcaagctcaccgtggacaagagcaggtggcagcaggggaacgtcttctcatgctccgtgatgcatgaggctctgcacaaccactacacgcagaagagcctctccctgtctccgggtaaatga

SEQ ID NO: 570 - protein, 508 aa, Artificial Sequence
  source: /note="Description of Artificial Sequence: Synthetic polypeptide"
MEAPAQLLFLLLLWLPDTTGEVQLVQSGAEVKKSGESLKISCKGSGYSFTSNWIGWVRQMPGKGLEWMGIIYPGDSDTRYSPSFQGQVTISADKSVSTAYLQWSSLKASDTAMYYCARMLTDCSSTSCYSAGMDVWGKGTLVTVSSGGGGSGGGGSGGGGSAQAVVIQEPSFSVSPGGTVTLTCGLSSGSVSPSYYPSWYQQTPGQAPRTLIYSTNTRSSGVPDRFSGSILGNKAALTITGAQADDESDYYCVLYMGSGSWVFGGGTKLTVLGDVREPKSSDKTHTCPPCPAPELLGGPSVFLFPPKPKDTLMISRTPEVTCVVVDVSHEDPEVKFNWYVDGVEVHNAKTKPREEQYNSTYRVVSVLTVLHQDWLNGKEYKCKVSNKALPAPIEKTISKAKGQPREPQVYTLPPSRDELTKNQVSLTCLVKGFYPSDIAVEWESNGQPENNYKTTPPVLDSDGSFFLYSKLTVDKSRWQQGNVFSCSVMHEALHNHYTQKSLSLSPGK

SEQ ID NO: 571 - DNA, 1515 bp, Artificial Sequence
  source: /note="Description of Artificial Sequence: Synthetic polynucleotide"
atggaagcaccagcgcagcttctcttcctcctgctactctggctcccagataccaccggtgaggtgcagctggtgcagtctggggcagaggtgaaaaagcccggggagtctctgaagatctcctgtaagggctctggatacagctttaccagctattggatcggctgggtgcgccagatgcccgggaaaggcctggagtggatggggatcatctatcctggtgactctgataccagatacagcccgtccttccaaggccaggtcaccatctcagccgacaagtccatcagcaccgcctacctgcagtggagcagcctgaaggcctcggacaccgccatgttttactgtgcgagactcaatgatagtagtggttatacgactaactttgactactggggccaaggcaccctggtcaccgtctcgagtggaggcggcggttcaggcggaggtggctctggcggtggcggaagtgcacaggctgtggtgatccaggagccatcgttctcagtgtcccctggagggacagtcacactcacttgtggcttgagctctggctcagtctctactcgttacaaccccagctggtaccagcagaccccaggccaggctccacgcacgctcatctacagtacaaacactcgttcttctggggtccctgaccgcttctctggctccatccttgggaacaaagctgccctcaccatcacgggggcccaggcagatgatgaatctgattattactgtgcgctgtatatgggtagtggcatttgggtgttcggcggagggaccaagctgaccgtcctaggtgacgtacgcgagcccaaatcttctgacaaaactcacacatgcccaccgtgcccagcacctgaactcctgggtggaccgtcagtcttcctcttccccccaaaacccaaggacaccctcatgatctcccggacccctgaggtcacatgcgtggtggtggacgtgagccacgaagaccctgaggtcaagttcaactggtacgtggacggcgtggaggtgcataatgccaagacaaagccgcgggaggagcagtacaacagcacgtaccgtgtggtcagcgtcctcaccgtcctgcaccaggactggctgaatggcaaggagtacaagtgcaaggtctccaacaaagccctcccagcccccatcgagaaaaccatctccaaagccaaagggcagccccgagaaccacaggtgtacaccctgcccccatcccgggatgagctgaccaagaaccaggtcagcctgacctgcctggtcaaaggcttctatccaagcgacatcgccgtggagtgggagagcaatgggcagccggagaacaactacaagaccacgcctcccgtgctggactccgacggctccttcttcctctacagcaagctcaccgtggacaagagcaggtggcagcaggggaacgtcttctcatgctccgtgatgcatgaggctctgcacaaccactacacgcagaagagcctctccctgtctccgggtaaatga

SEQ ID NO: 572 - protein, 504 aa, Artificial Sequence
  source: /note="Description of Artificial Sequence: Synthetic polypeptide"
MEAPAQLLFLLLLWLPDTTGEVQLVQSGAEVKKPGESLKISCKGSGYSFTSYWIGWVRQMPGKGLEWMGIIYPGDSDTRYSPSFQGQVTISADKSISTAYLQWSSLKASDTAMFYCARLNDSSGYTTNFDYWGQGTLVTVSSGGGGSGGGGSGGGGSAQAVVIQEPSFSVSPGGTVTLTCGLSSGSVSTRYNPSWYQQTPGQAPRTLIYSTNTRSSGVPDRFSGSILGNKAALTITGAQADDESDYYCALYMGSGIWVFGGGTKLTVLGDVREPKSSDKTHTCPPCPAPELLGGPSVFLFPPKPKDTLMISRTPEVTCVVVDVSHEDPEVKFNWYVDGVEVHNAKTKPREEQYNSTYRVVSVLTVLHQDWLNGKEYKCKVSNKALPAPIEKTISKAKGQPREPQVYTLPPSRDELTKNQVSLTCLVKGFYPSDIAVEWESNGQPENNYKTTPPVLDSDGSFFLYSKLTVDKSRWQQGNVFSCSVMHEALHNHYTQKSLSLSPGK

SEQ ID NO: 573 - DNA, 1524 bp, Artificial Sequence
  source: /note="Description of Artificial Sequence: Synthetic polynucleotide"
atggaagcaccagcgcagcttctcttcctcctgctactctggctcccagataccaccggtcaggtgcagctggtgcaatctggggcagaggtgaaaaagcccggggagtctctgaagatctcctgtaagggttctggatacagctttaccagccagtggatcgcctgggtgcgccagatgcccgggaaaggcctggagtggatggggatcatctatcctggtgactctgatacgagatacagcccgtccttccaaggccaggtcaccatctcagccgacaagtccatcaacaccgcctacctgcagtggagcagcctgaaggcctcggacaccgccatgtattactgtgcgagacattcggggagctctggagattactaccactactacggtatggacgtctggggccaagggacaatggtcaccgtctcgagtggaggcggcggttcaggcggaggtggctctggcggtggcggaagtgcacagactgtggtgatccaggagccatcgttctcagtgtcccctggagggacagtcacactcacttgtggcttgagctctggctcagtctctactagttactaccccagctggtaccagcagaccccaggccaggctccacgcacgctcatctacagcacaaacactcgctcttctggggtccctgatcgcttctctggctccatccttgggaacaaagctgccctcaccatcacgggggcccaggcagatgatggatctgattattactgtgtgctgtatatggggagtggcatttcggtgttcggcggagggaccaagctgaccgtcctaggtgacgtacgcgagcccaaatcttctgacaaaactcacacatgcccaccgtgcccagcacctgaactcctgggtggaccgtcagtcttcctcttccccccaaaacccaaggacaccctcatgatctcccggacccctgaggtcacatgcgtggtggtggacgtgagccacgaagaccctgaggtcaagttcaactggtacgtggacggcgtggaggtgcataatgccaagacaaagccgcgggaggagcagtacaacagcacgtaccgtgtggtcagcgtcctcaccgtcctgcaccaggactggctgaatggcaaggagtacaagtgcaaggtctccaacaaagccctcccagcccccatcgagaaaaccatctccaaagccaaagggcagccccgagaaccacaggtgtacaccctgcccccatcccgggatgagctgaccaagaaccaggtcagcctgacctgcctggtcaaaggcttctatccaagcgacatcgccgtggagtgggagagcaatgggcagccggagaacaactacaagaccacgcctcccgtgctggactccgacggctccttcttcctctacagcaagctcaccgtggacaagagcaggtggcagcaggggaacgtcttctcatgctccgtgatgcatgaggctctgcacaaccactacacgcagaagagcctctccctgtctccgggtaaatga

SEQ ID NO: 574 - protein, 507 aa, Artificial Sequence [sequence omitted]

SEQ ID NO: 575 - DNA, 1509 bp, Artificial Sequence
  source: /note="Description of Artificial Sequence: Synthetic polynucleotide"
atggaagcaccagcgcagcttctcttcctcctgctactctggctcccagataccaccggtcaggtgcagctgcaggagtcgggcccaggactggtgaagccttcggagaccctgtccctcacctgcactgtctctggttactccattagcagtggttactactggggctggatccggcagcccccagggagggggctggagtggattgggactatctatcatagtgggagcacctactacaacccgtccctcaagagtcgactcaccatatcagtagacacgtccgagaaccaattctccctgaagctgagttctgtgaccgccgcagacacggccgtgtattactgtgcgagagggatagcaggtcggacccattatgactactggggccaggggacaatggtcaccgtctcgagtggaggcggcggttcaggcggaggtggctctggcggtggcggaagtgcacaggctgtgctgactcagccgtcctcagtgtctggggccccagggcagagggtaaccatctcctgcagtgggagcagctccaacatcggggcaggttatgatgtacactggtaccagcagctcccaggagcagcccccaaactcctcatctatagtaacaatcatcggccctcaggggtccctgaccgattctctggctccaagtctggcacctcagcctccctggccatcactgggctccagactgaggatgaggctgattattactgccagtcctatgacagaagcctgagcggtagggtgttcggcggagggaccaagctgaccgtcctaggtgacgtacgcgagcccaaatcttctgacaaaactcacacatgcccaccgtgcccagcacctgaactcctgggtggaccgtcagtcttcctcttccccccaaaacccaaggacaccctcatgatctcccggacccctgaggtcacatgcgtggtggtggacgtgagccacgaagaccctgaggtcaagttcaactggtacgtggacggcgtggaggtgcataatgccaagacaaagccgcgggaggagcagtacaacagcacgtaccgtgtggtcagcgtcctcaccgtcctgcaccaggactggctgaatggcaaggagtacaagtgcaaggtctccaacaaagccctcccagcccccatcgagaaaaccatctccaaagccaaagggcagccccgagaaccacaggtgtacaccctgcccccatcccgggatgagctgaccaagaaccaggtcagcctgacctgcctggtcaaaggcttctatccaagcgacatcgccgtggagtgggagagcaatgggcagccggagaacaactacaagaccacgcctcccgtgctggactccgacggctccttcttcctctacagcaagctcaccgtggacaagagcaggtggcagcaggggaacgtcttctcatgctccgtgatgcatgaggctctgcacaaccactacacgcagaagagcctctccctgtctccgggtaaatga

SEQ ID NO: 576 - protein, 502 aa, Artificial Sequence
  source: /note="Description of Artificial Sequence: Synthetic polypeptide"
MEAPAQLLFLLLLWLPDTTGQVQLQESGPGLVKPSETLSLTCTVSGYSISSGYYWGWIRQPPGRGLEWIGTIYHSGSTYYNPSLKSRLTISVDTSENQFSLKLSSVTAADTAVYYCARGIAGRTHYDYWGQGTMVTVSSGGGGSGGGGSGGGGSAQAVLTQPSSVSGAPGQRVTISCSGSSSNIGAGYDVHWYQQLPGAAPKLLIYSNNHRPSGVPDRFSGSKSGTSASLAITGLQTEDEADYYCQSYDRSLSGRVFGGGTKLTVLGDVREPKSSDKTHTCPPCPAPELLGGPSVFLFPPKPKDTLMISRTPEVTCVVVDVSHEDPEVKFNWYVDGVEVHNAKTKPREEQYNSTYRVVSVLTVLHQDWLNGKEYKCKVSNKALPAPIEKTISKAKGQPREPQVYTLPPSRDELTKNQVSLTCLVKGFYPSDIAVEWESNGQPENNYKTTPPVLDSDGSFFLYSKLTVDKSRWQQGNVFSCSVMHEALHNHYTQKSLSLSPGK

SEQ ID NO: 577 - DNA, 1530 bp, Artificial Sequence
  source: /note="Description of Artificial Sequence: Synthetic polynucleotide"
atggaagcaccagcgcagcttctcttcctcctgctactctggctcccagataccaccggtcaggtccagctggtgcagtctggggctgaggtgaagaagcctggggcctcagtgaaggtctcctgcaaggcttctggttacacctttaccagctatggtatcagctgggtgcgacaggcccctggacaagggcttgagtggatgggatggatcagcgcttacaatggtaacacaaactatgcacagaagctccagggcagagtcaccatgaccacagacacatccacgagcacagcctacatggagctgaggagcctgagatctgacgacacggccgtgtattactgtgcgagagtggggtcgggatattgtagtggtggtagctgctacgtgggctggttcgacccctggggccgggggacaatggtcaccgtctcgagtggaggcggcggttcaggcggaggtggctctggcggtggcggaagtgcactttcttctgagctgactcaggaccctgctgtgtctgtggccttgggacagacagtcaagatcacatgccaaggagacagcctcagtgcctattatgcaacctggtaccagcagaagccaggccaggcccctgtacttgtcatctatggtaaaaacaagcggccgtccgggatcccagaccgattctctggctccaagtcaggaaacacagcttccttgaccatcacgggggctcaggcggaagatgaggctgactattactgtaactcccgggacagcagtggtaatgatcattatgtcttcggaactgggaccaagctgaccgttctaggtgacgtacgcgagcccaaatcttctgacaaaactcacacatgcccaccgtgcccagcacctgaactcctgggtggaccgtcagtcttcctcttccccccaaaacccaaggacaccctcatgatctcccggacccctgaggtcacatgcgtggtggtggacgtgagccacgaagaccctgaggtcaagttcaactggtacgtggacggcgtggaggtgcataatgccaagacaaagccgcgggaggagcagtacaacagcacgtaccgtgtggtcagcgtcctcaccgtcctgcaccaggactggctgaatggcaaggagtacaagtgcaaggtctccaacaaagccctcccagcccccatcgagaaaaccatctccaaagccaaagggcagccccgagaaccacaggtgtacaccctgcccccatcccgggatgagctgaccaagaaccaggtcagcctgacctgcctggtcaaaggcttctatccaagcgacatcgccgtggagtgggagagcaatgggcagccggagaacaactacaagaccacgcctcccgtgctggactccgacggctccttcttcctctacagcaagctcaccgtggacaagagcaggtggcagcaggggaacgtcttctcatgctccgtgatgcatgaggctctgcacaaccactacacgcagaagagcctctccctgtctccgggtaaatga

SEQ ID NO: 578 - protein, 509 aa, Artificial Sequence [sequence omitted]

SEQ ID NO: 579 - DNA, 1515 bp, Artificial Sequence
  source: /note="Description of Artificial Sequence: Synthetic polynucleotide"
atggaagcaccagcgcagcttctcttcctcctgctactctggctcccagataccaccggtgaggtgcagctggtgcagtctggggcagaagtcaagaggcccggagagtctctgaagatctcctgtagggcctctggatacatctttacgaacaattgggtcgcctgggtgcgccagcagcccgggaaaggcctggagtggatggggatcatctatcctggtgactctgacaccagatacagcccgtccttccaaggccaggtcactttctcggccgacacgtccatcaacaccgcctacctacagtggaatagcctgaaggcctcggacaccgccacttacttctgtgcgcgagaggcctacaactcatacgaatattacggtatggacgtctgggggcgagggaccacggtcaccgtctcgagtggaggcggcggttcaggcggaggtggctctggcggtggcggaagtgcacagactgtggtgatccaggagccatcgttctcagtgtcccctggagggacagtcacactcacttgtggcttgagctctggctcagtctctactaattactaccccagctggtaccagcagaccccaggccaggctccacgcacgctcatctacaacacaaacactcgctcttctggggtccctgatcgcttctctggctccatccttgggaacaaagctgccctcaccatcacgggggcccaggcagatgatgaatctgattattactgtgtgctgtatatgggtagtggcatttcggtgttcggcggagggaccaaggtcaccgtcctaggtgacgtacgcgagcccaaatcttctgacaaaactcacacatgcccaccgtgcccagcacctgaactcctgggtggaccgtcagtcttcctcttccccccaaaacccaaggacaccctcatgatctcccggacccctgaggtcacatgcgtggtggtggacgtgagccacgaagaccctgaggtcaagttcaactggtacgtggacggcgtggaggtgcataatgccaagacaaagccgcgggaggagcagtacaacagcacgtaccgtgtggtcagcgtcctcaccgtcctgcaccaggactggctgaatggcaaggagtacaagtgcaaggtctccaacaaagccctcccagcccccatcgagaaaaccatctccaaagccaaagggcagccccgagaaccacaggtgtacaccctgcccccatcccgggatgagctgaccaagaaccaggtcagcctgacctgcctggtcaaaggcttctatccaagcgacatcgccgtggagtgggagagcaatgggcagccggagaacaactacaagaccacgcctcccgtgctggactccgacggctccttcttcctctacagcaagctcaccgtggacaagagcaggtggcagcaggggaacgtcttctcatgctccgtgatgcatgaggctctgcacaaccactacacgcagaagagcctctccctgtctccgggtaaatga

SEQ ID NO: 580 - protein, 504 aa, Artificial Sequence
  source: /note="Description of Artificial Sequence: Synthetic polypeptide"
MEAPAQLLFLLLLWLPDTTGEVQLVQSGAEVKRPGESLKISCRASGYIFTNNWVAWVRQQPGKGLEWMGIIYPGDSDTRYSPSFQGQVTFSADTSINTAYLQWNSLKASDTATYFCAREAYNSYEYYGMDVWGRGTTVTVSSGGGGSGGGGSGGGGSAQTVVIQEPSFSVSPGGTVTLTCGLSSGSVSTNYYPSWYQQTPGQAPRTLIYNTNTRSSGVPDRFSGSILGNKAALTITGAQADDESDYYCVLYMGSGISVFGGGTKVTVLGDVREPKSSDKTHTCPPCPAPELLGGPSVFLFPPKPKDTLMISRTPEVTCVVVDVSHEDPEVKFNWYVDGVEVHNAKTKPREEQYNSTYRVVSVLTVLHQDWLNGKEYKCKVSNKALPAPIEKTISKAKGQPREPQVYTLPPSRDELTKNQVSLTCLVKGFYPSDIAVEWESNGQPENNYKTTPPVLDSDGSFFLYSKLTVDKSRWQQGNVFSCSVMHEALHNHYTQKSLSLSPGK

SEQ ID NO: 581 - DNA, 1533 bp, Artificial Sequence
  source: /note="Description of Artificial Sequence: Synthetic polynucleotide"
atggaagcaccagcgcagcttctcttcctcctgctactctggctcccagataccaccggtcaggtccagctggtgcagtctggaggagaggtgaaaaagcccggggagtctctgaagatctcctgtaaggtttctggagacaagtttgccaactactggatcgcctgggtgcgccaggtgcccgggagaggcctggagtggatgggaatcatctatcctagtgactctgatgtcagatatagtccgtccttccaaggccaagtcaccatgtcagccgacaagtccaccagcaccgcctacttgcagttgagcagcctgaaggcctcggacaccgccatgtattactgtgcaagacaggtgggtggactggttactacagacactgactcctacttctacggcatggacgtctggggccaaggaaccctggtcaccgtctcgagtggaggcggcggttcaggcggaggtggctctggcggtggcggaagtgcacaggctgtggtgatccaggagccatcgttctcagtgtcccctggagggacagtcacactcacttgtggcttgagctctggcccagtctctactagttactaccccagctggttccaacagaccccaggccaggctccacgcacgctcatctacagcacaaacactcgctcttctggggtccctgatcgcttctctggctccatccttgggaacaaagctgccctcaccatcacgggggcccaggcagatgatgaatctgattattactgtgtgttgtatgtgggtagtggcatttcgctattcggcggggggaccaaggtcaccgtcctaggtgacgtacgcgagcccaaatcttctgacaaaactcacacatgcccaccgtgcccagcacctgaactcctgggtggaccgtcagtcttcctcttccccccaaaacccaaggacaccctcatgatctcccggacccctgaggtcacatgcgtggtggtggacgtgagccacgaagaccctgaggtcaagttcaactggtacgtggacggcgtggaggtgcataatgccaagacaaagccgcgggaggagcagtacaacagcacgtaccgtgtggtcagcgtcctcaccgtcctgcaccaggactggctgaatggcaaggagtacaagtgcaaggtctccaacaaagccctcccagcccccatcgagaaaaccatctccaaagccaaagggcagccccgagaaccacaggtgtacaccctgcccccatcccgggatgagctgaccaagaaccaggtcagcctgacctgcctggtcaaaggcttctatccaagcgacatcgccgtggagtgggagagcaatgggcagccggagaacaactacaagaccacgcctcccgtgctggactccgacggctccttcttcctctacagcaagctcaccgtggacaagagcaggtggcagcaggggaacgtcttctcatgctccgtgatgcatgaggctctgcacaaccactacacgcagaagagcctctccctgtctccgggtaaatga

SEQ ID NO: 582 - protein, 510 aa, Artificial Sequence
  source: /note="Description of Artificial Sequence: Synthetic polypeptide"
MEAPAQLLFLLLLWLPDTTGQVQLVQSGGEVKKPGESLKISCKVSGDKFANYWIAWVRQVPGRGLEWMGIIYPSDSDVRYSPSFQGQVTMSADKSTSTAYLQLSSLKASDTAMYYCARQVGGLVTTDTDSYFYGMDVWGQGTLVTVSSGGGGSGGGGSGGGGSAQAVVIQEPSFSVSPGGTVTLTCGLSSGPVSTSYYPSWFQQTPGQAPRTLIYSTNTRSSGVPDRFSGSILGNKAALTITGAQADDESDYYCVLYVGSGISLFGGGTKVTVLGDVREPKSSDKTHTCPPCPAPELLGGPSVFLFPPKPKDTLMISRTPEVTCVVVDVSHEDPEVKFNWYVDGVEVHNAKTKPREEQYNSTYRVVSVLTVLHQDWLNGKEYKCKVSNKALPAPIEKTISKAKGQPREPQVYTLPPSRDELTKNQVSLTCLVKGFYPSDIAVEWESNGQPENNYKTTPPVLDSDGSFFLYSKLTVDKSRWQQGNVFSCSVMHEALHNHYTQKSLSLSPGK

SEQ ID NO: 583 - DNA, 1515 bp, Artificial Sequence
  source: /note="Description of Artificial Sequence: Synthetic polynucleotide"
atggaagcaccagcgcagcttctcttcctcctgctactctggctcccagataccaccggtgaggtgcagctggtggagtccgggggaggcttggtccagccgggggggtccctaaaactttcctgtgcagcctctgggctcaatttcgatatctctactgtgcactgggtccgccaggcttccgggaaagggctggagtggattggccgtattagaagcaaagcttacaattatgcgacagcatatactgagtcgctgaagggcaggttcatcatctccagagatgagtcaaagaatacggcggatctgcaaatcaacagcctgaaaaccgaggacacggccacatattactgtagtatgaccttcggtgactactactactacggcatggacgtctggggccggggcaccctggtcaccgtctcgagtggaggcggcggttcaggcggaggtggctctggcggtggcggaagtgcacaggctgtgctgactcagccgtcctcagtgtctggggccccagggcagagggtcaccatcacctgcactggaagcagctccaacatcggggccggttacgatgttcactggtaccagcaacttccaggaacagcccccaaactcctcatctatagtaattcttatcggccctctggggtctctgaccgattctctggctccaagtctggcacctcagcctccctggtcatcgctggactccaggctgaggatgaggctgattattactgtcagtcctatgacagcagtcattggtttttcggcggagggaccaagctgaccgtcctaggtgacgtacgcgagcccaaatcttctgacaaaactcacacatgcccaccgtgcccagcacctgaactcctgggtggaccgtcagtcttcctcttccccccaaaacccaaggacaccctcatgatctcccggacccctgaggtcacatgcgtggtggtggacgtgagccacgaagaccctgaggtcaagttcaactggtacgtggacggcgtggaggtgcataatgccaagacaaagccgcgggaggagcagtacaacagcacgtaccgtgtggtcagcgtcctcaccgtcctgcaccaggactggctgaatggcaaggagtacaagtgcaaggtctccaacaaagccctcccagcccccatcgagaaaaccatctccaaagccaaagggcagccccgagaaccacaggtgtacaccctgcccccatcccgggatgagctgaccaagaaccaggtcagcctgacctgcctggtcaaaggcttctatccaagcgacatcgccgtggagtgggagagcaatgggcagccggagaacaactacaagaccacgcctcccgtgctggactccgacggctccttcttcctctacagcaagctcaccgtggacaagagcaggtggcagcaggggaacgtcttctcatgctccgtgatgcatgaggctctgcacaaccactacacgcagaagagcctctccctgtctccgggtaaatga

SEQ ID NO: 584 - protein, 504 aa, Artificial Sequence
  source: /note="Description of Artificial Sequence: Synthetic polypeptide"
MEAPAQLLFLLLLWLPDTTGEVQLVESGGGLVQPGGSLKLSCAASGLNFDISTVHWVRQASGKGLEWIGRIRSKAYNYATAYTESLKGRFIISRDESKNTADLQINSLKTEDTATYYCSMTFGDYYYYGMDVWGRGTLVTVSSGGGGSGGGGSGGGGSAQAVLTQPSSVSGAPGQRVTITCTGSSSNIGAGYDVHWYQQLPGTAPKLLIYSNSYRPSGVSDRFSGSKSGTSASLVIAGLQAEDEADYYCQSYDSSHWFFGGGTKLTVLGDVREPKSSDKTHTCPPCPAPELLGGPSVFLFPPKPKDTLMISRTPEVTCVVVDVSHEDPEVKFNWYVDGVEVHNAKTKPREEQYNSTYRVVSVLTVLHQDWLNGKEYKCKVSNKALPAPIEKTISKAKGQPREPQVYTLPPSRDELTKNQVSLTCLVKGFYPSDIAVEWESNGQPENNYKTTPPVLDSDGSFFLYSKLTVDKSRWQQGNVFSCSVMHEALHNHYTQKSLSLSPGK

SEQ ID NO: 585 - DNA, 1533 bp, Artificial Sequence
  source: /note="Description of Artificial Sequence: Synthetic polynucleotide"
atggaagcaccagcgcagcttctcttcctcctgctactctggctcccagataccaccggtcaggtccagctggtgcagtctggaggagaggtgaaaaagcccggggagtctctgaagatctcctgtaaggtttctggagacagctttaccaactactggatcgcctgggtgcgccagatgcccgggagaggcctggagtggatgggaatcatctatcctagtgactctgatgtcagatatagtccgtccttccaaggccaggtcaccatgtcagccgacaagtccatcagcaccgcctacctgcagttgagcagcctgaaggcctcggacaccgccatgtattactgtgcaagacaggtgggtggactggttactacagacactgactcctacttctacggcatggacgtctggggcagaggcaccctggtcaccgtctcgagtggaggcggcggttcaggcggaggtggctctggcggtggcggaagtgcacagactgtggtgatccaggagccatcgttctcagtgtcccctggagggacagtcacactcacttgtgccttgaactccggctcagtctctactaattactaccccagctggtaccagcagaccccaggccaggctccacgcacgctcatccacagcacaaacactcgctcttctggggtccctgatcgcttctctggctccatccttgggaacaatgctgccctcaccatcacgggggcccaggcagaggatgaatctgattattactgtgcgctatatatgggtagtggcatttcgatattcggcggagggaccaagctgaccgtcctaggtgacgtacgcgagcccaaatcttctgacaaaactcacacatgcccaccgtgcccagcacctgaactcctgggtggaccgtcagtcttcctcttccccccaaaacccaaggacaccctcatgatctcccggacccctgaggtcacatgcgtggtggtggacgtgagccacgaagaccctgaggtcaagttcaactggtacgtggacggcgtggaggtgcataatgccaagacaaagccgcgggaggagcagtacaacagcacgtaccgtgtggtcagcgtcctcaccgtcctgcaccaggactggctgaatggcaaggagtacaagtgcaaggtctccaacaaagccctcccagcccccatcgagaaaaccatctccaaagccaaagggcagccccgagaaccacaggtgtacaccctgcccccatcccgggatgagctgaccaagaaccaggtcagcctgacctgcctggtcaaaggcttctatccaagcgacatcgccgtggagtgggagagcaatgggcagccggagaacaactacaagaccacgcctcccgtgctggactccgacggctccttcttcctctacagcaagctcaccgtggacaagagcaggtggcagcaggggaacgtcttctcatgctccgtgatgcatgaggctctgcacaaccactacacgcagaagagcctctccctgtctccgggtaaatga

SEQ ID NO: 586 - protein, 510 aa, Artificial Sequence [sequence omitted]

SEQ ID NO: 587 - DNA, 1527 bp, Artificial Sequence
  source: /note="Description of Artificial Sequence: Synthetic polynucleotide"
atggaagcaccagcgcagcttctcttcctcctgctactctggctcccagataccaccggtgaggtccagctggtgcagtctggagcagaggtgaaaaagcccggggagtctctgaagatctcctgtaagggttctggatacagctttcccagctactggatcggctgggtgcgccagatgcccgggaaaggcctggagtggatggggatcatctatcctggtgactctgaaaccagatacagcccgtccttccaaggccaggtcaccatctcagccgacaagtccatcagcaccgcctacctgcagtggagcagcctgaaggcctcggacaccgccatgtattactgtgtgagacatctaaaaccagtggctggtcccgcttggcacgactacggtatggacgtctggggccagggcaccctggtcaccgtctcgagtggaggcggcggttcaggcggaggtggctctggcggtggcggaagtgcacaggctgtggtgctccaggagccatcgatctcagtgtcccctggagggacagtcacactcacttgtggcttaacctctgactcagtctcgactacttactaccccagctggtaccagcagaccccaggccagactccacgcacactcagctacagcacaaatactcgctcttctggggtccctgatcgcttctctggctccatccttgggaacaaagctgccctcaccatcgcgggggcccaggcagatgatgaagctgattattactgtgccctatatatgggcagtggcatttgggtgttcggcggagggacccagctcaccgttttaagtgacgtacgcgagcccaaatcttctgacaaaactcacacatgcccaccgtgcccagcacctgaactcctgggtggaccgtcagtcttcctcttccccccaaaacccaaggacaccctcatgatctcccggacccctgaggtcacatgcgtggtggtggacgtgagccacgaagaccctgaggtcaagttcaactggtacgtggacggcgtggaggtgcataatgccaagacaaagccgcgggaggagcagtacaacagcacgtaccgtgtggtcagcgtcctcaccgtcctgcaccaggactggctgaatggcaaggagtacaagtgcaaggtctccaacaaagccctcccagcccccatcgagaaaaccatctccaaagccaaagggcagccccgagaaccacaggtgtacaccctgcccccatcccgggatgagctgaccaagaaccaggtcagcctgacctgcctggtcaaaggcttctatccaagcgacatcgccgtggagtgggagagcaatgggcagccggagaacaactacaagaccacgcctcccgtgctggactccgacggctccttcttcctctacagcaagctcaccgtggacaagagcaggtggcagcaggggaacgtcttctcatgctccgtgatgcatgaggctctgcacaaccactacacgcagaagagcctctccctgtctccgggtaaatga

SEQ ID NO: 588 - protein, 508 aa, Artificial Sequence
  source: /note="Description of Artificial Sequence: Synthetic polypeptide"
MEAPAQLLFLLLLWLPDTTGEVQLVQSGAEVKKPGESLKISCKGSGYSFPSYWIGWVRQMPGKGLEWMGIIYPGDSETRYSPSFQGQVTISADKSISTAYLQWSSLKASDTAMYYCVRHLKPVAGPAWHDYGMDVWGQGTLVTVSSGGGGSGGGGSGGGGSAQAVVLQEPSISVSPGGTVTLTCGLTSDSVSTTYYPSWYQQTPGQTPRTLSYSTNTRSSGVPDRFSGSILGNKAALTIAGAQADDEADYYCALYMGSGIWVFGGGTQLTVLSDVREPKSSDKTHTCPPCPAPELLGGPSVFLFPPKPKDTLMISRTPEVTCVVVDVSHEDPEVKFNWYVDGVEVHNAKTKPREEQYNSTYRVVSVLTVLHQDWLNGKEYKCKVSNKALPAPIEKTISKAKGQPREPQVYTLPPSRDELTKNQVSLTCLVKGFYPSDIAVEWESNGQPENNYKTTPPVLDSDGSFFLYSKLTVDKSRWQQGNVFSCSVMHEALHNHYTQKSLSLSPGK

SEQ ID NO: 589 - DNA, 1515 bp, Artificial Sequence
  source: /note="Description of Artificial Sequence: Synthetic polynucleotide"
atggaagcaccagcgcagcttctcttcctcctgctactctggctcccagataccaccggtgaggtccagctggtacagtctggggctgaggtgaggaagcctggggcctcagtcaaggtctcctgcagggcttctggatacaacttcaaagactactatttgcactgggtgcgccaggcccctggagaagggcttgagtggatggggtggatcaaccctcacgctggtaccacaaaatatgcacagaattttcagcacaggattattatgaccagggacacgaccatcaccacagcctacatggaactgagcagtctgaaatctgacgacacagccatttatttctgtaccagatactactttgacagtagtggttattttaggttcgacccctggggccaagggacaatggtcaccgtctcgagtggaggcggcggttcaggcggaggtggctctggcggtggcggaagtgcacagtctgtcgtgacgcagccgccctcagtgtctggggccccaggacagaaggtcaccatctcctgctctggaagcagctccaacattgggaataattatgtatcctggtaccagcagctcccaggaacagcccccaaactcctcatttatgacaataataagcgaccctcagggattcctgaccgattctctggctccaagtctggcacgtcagccaccctgggcatcaccggactccagactggggacgaggccgattattactgcggaacatgggatagcagcctgagtgctggggtgttcggcggagggaccaaggtcaccgtcctaggtgacgtacgcgagcccaaatcttctgacaaaactcacacatgcccaccgtgcccagcacctgaactcctgggtggaccgtcagtcttcctcttccccccaaaacccaaggacaccctcatgatctcccggacccctgaggtcacatgcgtggtggtggacgtgagccacgaagaccctgaggtcaagttcaactggtacgtggacggcgtggaggtgcataatgccaagacaaagccgcgggaggagcagtacaacagcacgtaccgtgtggtcagcgtcctcaccgtcctgcaccaggactggctgaatggcaaggagtacaagtgcaaggtctccaacaaagccctcccagcccccatcgagaaaaccatctccaaagccaaagggcagccccgagaaccacaggtgtacaccctgcccccatcccgggatgagctgaccaagaaccaggtcagcctgacctgcctggtcaaaggcttctatccaagcgacatcgccgtggagtgggagagcaatgggcagccggagaacaactacaagaccacgcctcccgtgctggactccgacggctccttcttcctctacagcaagctcaccgtggacaagagcaggtggcagcaggggaacgtcttctcatgctccgtgatgcatgaggctctgcacaaccactacacgcagaagagcctctccctgtctccgggtaaatga

SEQ ID NO: 590 - protein, 504 aa, Artificial Sequence [sequence omitted]

SEQ ID NO: 591 - DNA, 1512 bp, Artificial Sequence
  source: /note="Description of Artificial Sequence: Synthetic polynucleotide"
atggaagcaccagcgcagcttctcttcctcctgctactctggctcccagataccaccggtgaggtgcagctggtgcagtctggggcagagatgaaaaagcccggggagtctctgaagatatcctgcaagacttctggatacagctttaccggctcctggatcgcctgggtgcgccagatgcccgggaaaggcctggagtggatggggatcatctatcctggtgactctgacaccagatacagcccgtccttccaaggccaggtcaccatctcagccgacaagtccatcagcaccgcctacctgcagtggagcagcctgaaggcctcggacaccgccatgtattactgtgcgaggatttatagtgactcgggttacaattggttcgactcttggggcaggggaaccctggtcaccgtctcgagtggaggcggcggttcaggcggaggtggctctggcggtggcggaagtgcacagactgtggtgatccaggagccatcgttctcagtgtcccctggagggacagtcacactcacttgtggcttgagctctggctcagtctctaatagtcactaccccagctggtatcagcagaccccaggccaggctccacgaacgctcatctacagcacaaacactcgctcttctggggtccctgatcgcttctctggctccatccttgggaacaaagctgccctcaccatcacgggggcccaggcggatgatgaatctgatttttactgtctgctatatctgggtagtggcatttcggtattcggcggagggaccaagctgaccgtcctaggtgacgtacgcgagcccaaatcttctgacaaaactcacacatgcccaccgtgcccagcacctgaactcctgggtggaccgtcagtcttcctcttccccccaaaacccaaggacaccctcatgatctcccggacccctgaggtcacatgcgtggtggtggacgtgagccacgaagaccctgaggtcaagttcaactggtacgtggacggcgtggaggtgcataatgccaagacaaagccgcgggaggagcagtacaacagcacgtaccgtgtggtcagcgtcctcaccgtcctgcaccaggactggctgaatggcaaggagtacaagtgcaaggtctccaacaaagccctcccagcccccatcgagaaaaccatctccaaagccaaagggcagccccgagaaccacaggtgtacaccctgcccccatcccgggatgagctgaccaagaaccaggtcagcctgacctgcctggtcaaaggcttctatccaagcgacatcgccgtggagtgggagagcaatgggcagccggagaacaactacaagaccacgcctcccgtgctggactccgacggctccttcttcctctacagcaagctcaccgtggacaagagcaggtggcagcaggggaacgtcttctcatgctccgtgatgcatgaggctctgcacaaccactacacgcagaagagcctctccctgtctccgggtaaatga

SEQ ID NO: 592 - protein, 503 aa, Artificial Sequence
  source: /note="Description of Artificial Sequence: Synthetic polypeptide"
MEAPAQLLFLLLLWLPDTTGEVQLVQSGAEMKKPGESLKISCKTSGYSFTGSWIAWVRQMPGKGLEWMGIIYPGDSDTRYSPSFQGQVTISADKSISTAYLQWSSLKASDTAMYYCARIYSDSGYNWFDSWGRGTLVTVSSGGGGSGGGGSGGGGSAQTVVIQEPSFSVSPGGTVTLTCGLSSGSVSNSHYPSWYQQTPGQAPRTLIYSTNTRSSGVPDRFSGSILGNKAALTITGAQADDESDFYCLLYLGSGISVFGGGTKLTVLGDVREPKSSDKTHTCPPCPAPELLGGPSVFLFPPKPKDTLMISRTPEVTCVVVDVSHEDPEVKFNWYVDGVEVHNAKTKPREEQYNSTYRVVSVLTVLHQDWLNGKEYKCKVSNKALPAPIEKTISKAKGQPREPQVYTLPPSRDELTKNQVSLTCLVKGFYPSDIAVEWESNGQPENNYKTTPPVLDSDGSFFLYSKLTVDKSRWQQGNVFSCSVMHEALHNHYTQKSLSLSPGK

SEQ ID NO: 593 - DNA, 1521 bp, Artificial Sequence
  source: /note="Description of Artificial Sequence: Synthetic polynucleotide"
atggaagcaccagcgcagcttctcttcctcctgctactctggctcccagataccaccggtgaagtgcagctggtgcagtctggagcagaggtgaaaaagcccggggagtctctgaagatctcctgtaagggttctggatacaactttaacactcactggatcgggtgggtgcgccagatgcccgggaaaggcctggagtggatggggctcatctaccctgatgactctgacacccgattcagcccgtccttcgaaggccaggtcaccctctcagccgacaggtccatcagtaccgcctacctgcagtggaccagcctgaaggcctcggacaccgccatgtattactgtgcgagatacaaaaaaagtagtggttattacacaggatatggtatggacgtctggggccgagggacaatggtcaccgtctcgagtggaggcggcggttcaggcggaggtggctctggcggtggcggaagtgcacagactgtggtgatccaggagccatcgttctcagtgtcccctggagggacagtcacactcacttgtggcttgagctctggctcagtctctactagttactaccccacctggtaccagcagaccccaggccaggctccacgcacgctcatctatagcacaaacagtcgcttttctggggtccctgatcgcttctctggctccatccttgggagcaaagctgccctcaccatcacgggggcccaggcagatgatgaatctgattattactgtgtgctatatatgggtagtggcatttcggtgttcggcggagggaccaagctgaccgtcctaggtgacgtacgcgagcccaaatcttctgacaaaactcacacatgcccaccgtgcccagcacctgaactcctgggtggaccgtcagtcttcctcttccccccaaaacccaaggacaccctcatgatctcccggacccctgaggtcacatgcgtggtggtggacgtgagccacgaagaccctgaggtcaagttcaactggtacgtggacggcgtggaggtgcataatgccaagacaaagccgcgggaggagcagtacaacagcacgtaccgtgtggtcagcgtcctcaccgtcctgcaccaggactggctgaatggcaaggagtacaagtgcaaggtctccaacaaagccctcccagcccccatcgagaaaaccatctccaaagccaaagggcagccccgagaaccacaggtgtacaccctgcccccatcccgggatgagctgaccaagaaccaggtcagcctgacctgcctggtcaaaggcttctatccaagcgacatcgccgtggagtgggagagcaatgggcagccggagaacaactacaagaccacgcctcccgtgctggactccgacggctccttcttcctctacagcaagctcaccgtggacaagagcaggtggcagcaggggaacgtcttctcatgctccgtgatgcatgaggctctgcacaaccactacacgcagaagagcctctccctgtctccgggtaaatga

SEQ ID NO: 594 - protein, 506 aa, Artificial Sequence
  source: /note="Description of Artificial Sequence: Synthetic polypeptide"
MEAPAQLLFLLLLWLPDTTGEVQLVQSGAEVKKPGESLKISCKGSGYNFNTHWIGWVRQMPGKGLEWMGLIYPDDSDTRFSPSFEGQVTLSADRSISTAYLQWTSLKASDTAMYYCARYKKSSGYYTGYGMDVWGRGTMVTVSSGGGGSGGGGSGGGGSAQTVVIQEPSFSVSPGGTVTLTCGLSSGSVSTSYYPTWYQQTPGQAPRTLIYSTNSRFSGVPDRFSGSILGSKAALTITGAQADDESDYYCVLYMGSGISVFGGGTKLTVLGDVREPKSSDKTHTCPPCPAPELLGGPSVFLFPPKPKDTLMISRTPEVTCVVVDVSHEDPEVKFNWYVDGVEVHNAKTKPREEQYNSTYRVVSVLTVLHQDWLNGKEYKCKVSNKALPAPIEKTISKAKGQPREPQVYTLPPSRDELTKNQVSLTCLVKGFYPSDIAVEWESNGQPENNYKTTPPVLDSDGSFFLYSKLTVDKSRWQQGNVFSCSVMHEALHNHYTQKSLSLSPGK

SEQ ID NO: 595 - DNA, 1512 bp, Artificial Sequence
  source: /note="Description of Artificial Sequence: Synthetic polynucleotide"
atggaagcaccagcgcagcttctcttcctcctgctactctggctcccagataccaccggtcaggtgcagctgcaggagtccggcccaggactcgtgaagcctgcggggactctgtccctcacctgcgctgtctccggtgactccatcagcagcaatcactggtggaattgggtccgccagtccccagggaagggactggaatggattggtgaaatctttcatagtgacattcgcatcctcaacccgtccctcaagaggcgcgtctccatgtcagtcgacaggtccaaggaccaattctccctgcaactgacctctgtgaccgccgcggacacggccgtgtattactgtgcgagaggtttccatggtgactccggcagaggacttgacacctggggcagaggaaccctggtcaccgtctcgagtggaggcggcggttcaggcggaggtggctctggcggtggcggaagtgcactttcttctgagctgactcaggaccctgctgtgtctgtggccttgggacagacagtcagggtcacatgccaaggagacggcctcagaagttattatgcaagctggtaccagcagaagccagggcaggcccctgtccttgtcatgtatgggaacaacaaccggccctcagggatcccagaccgattctctggctccagctcgggaaacacagcttccttgaccatcactggggctcaggcggaagatgaggctgtctattattgtaattcgcgggacagcggtgctaaccatctggaggttttcggcggagggaccaaggtcaccgtcctaggtgacgtacgcgagcccaaatcttctgacaaaactcacacatgcccaccgtgcccagcacctgaactcctgggtggaccgtcagtcttcctcttccccccaaaacccaaggacaccctcatgatctcccggacccctgaggtcacatgcgtggtggtggacgtgagccacgaagaccctgaggtcaagttcaactggtacgtggacggcgtggaggtgcataatgccaagacaaagccgcgggaggagcagtacaacagcacgtaccgtgtggtcagcgtcctcaccgtcctgcaccaggactggctgaatggcaaggagtacaagtgcaaggtctccaacaaagccctcccagcccccatcgagaaaaccatctccaaagccaaagggcagccccgagaaccacaggtgtacaccctgcccccatcccgggatgagctgaccaagaaccaggtcagcctgacctgcctggtcaaaggcttctatccaagcgacatcgccgtggagtgggagagcaatgggcagccggagaacaactacaagaccacgcctcccgtgctggactccgacggctccttcttcctctacagcaagctcaccgtggacaagagcaggtggcagcaggggaacgtcttctcatgctccgtgatgcatgaggctctgcacaaccactacacgcagaagagcctctccctgtctccgggtaaatga

SEQ ID NO: 596 - protein, 503 aa, Artificial Sequence
  source: /note="Description of Artificial Sequence: Synthetic polypeptide"
MEAPAQLLFLLLLWLPDTTGQVQLQESGPGLVKPAGTLSLTCAVSGDSISSNHWWNWVRQSPGKGLEWIGEIFHSDIRILNPSLKRRVSMSVDRSKDQFSLQLTSVTAADTAVYYCARGFHGDSGRGLDTWGRGTLVTVSSGGGGSGGGGSGGGGSALSSELTQDPAVSVALGQTVRVTCQGDGLRSYYASWYQQKPGQAPVLVMYGNNNRPSGIPDRFSGSSSGNTASLTITGAQAEDEAVYYCNSRDSGANHLEVFGGGTKVTVLGDVREPKSSDKTHTCPPCPAPELLGGPSVFLFPPKPKDTLMISRTPEVTCVVVDVSHEDPEVKFNWYVDGVEVHNAKTKPREEQYNSTYRVVSVLTVLHQDWLNGKEYKCKVSNKALPAPIEKTISKAKGQPREPQVYTLPPSRDELTKNQVSLTCLVKGFYPSDIAVEWESNGQPENNYKTTPPVLDSDGSFFLYSKLTVDKSRWQQGNVFSCSVMHEALHNHYTQKSLSLSPGK

SEQ ID NO: 597 - DNA, 1512 bp, Artificial Sequence
  source: /note="Description of Artificial Sequence: Synthetic polynucleotide"
atggaagcaccagcgcagcttctcttcctcctgctactctggctcccagataccaccggtgaggtgcagctggtggagtctgggggaggcttggcacagcctggggggtccctgagactctcctgtgcagcctctggattaacctttaccacctatgccatgagctgggtccgccaggctccagggaaggggctggagtgggtctcaagtattagtggaagtggtcatagcacatattacgcagactccgtgaagggccgcttcaccatctccagagacatttccaagaacacgttgtatctgcaaatgaacagcctcagagccgaggacacggccgtctattactgtgcgaaagattcgtcggcttttgggtttgtacacggtgcttttgatatctggggccagggaaccctggtcaccgtctcgagtggaggcggcggttcaggcggaggtggctctggcggtggcggaagtgcactttcttctgagctgactcaggaccctgctgcgtctgtggccttgggacagacagtcagcatcacatgccaaggagacagcctcagaaactattgggctagctggtaccagcagaagccaggacaggcccctgtacttgtcatctatggtaaaaatacccggccctcagggatcccagaccgattctctggctccacctcaggaaacacagcttccttgaccatcactggggctcaggcggaggatgaggctgactattactgcaactcccgggacagtggtcaccgtcttcttttcggcggagggaccaagctgaccgtcctaggtgacgtacgcgagcccaaatcttctgacaaaactcacacatgcccaccgtgcccagcacctgaactcctgggtggaccgtcagtcttcctcttccccccaaaacccaaggacaccctcatgatctcccggacccctgaggtcacatgcgtggtggtggacgtgagccacgaagaccctgaggtcaagttcaactggtacgtggacggcgtggaggtgcataatgccaagacaaagccgcgggaggagcagtacaacagcacgtaccgtgtggtcagcgtcctcaccgtcctgcaccaggactggctgaatggcaaggagtacaagtgcaaggtctccaacaaagccctcccagcccccatcgagaaaaccatctccaaagccaaagggcagccccgagaaccacaggtgtacaccctgcccccatcccgggatgagctgaccaagaaccaggtcagcctgacctgcctggtcaaaggcttctatccaagcgacatcgccgtggagtgggagagcaatgggcagccggagaacaactacaagaccacgcctcccgtgctggactccgacggctccttcttcctctacagcaagctcaccgtggacaagagcaggtggcagcaggggaacgtcttctcatgctccgtgatgcatgaggctctgcacaaccactacacgcagaagagcctctccctgtctccgggtaaatga

SEQ ID NO: 598 - protein, 503 aa, Artificial Sequence
  source: /note="Description of Artificial Sequence: Synthetic polypeptide"
MEAPAQLLFLLLLWLPDTTGEVQLVESGGGLAQPGGSLRLSCAASGLTFTTYAMSWVRQAPGKGLEWVSSISGSGHSTYYADSVKGRFTISRDISKNTLYLQMNSLRAEDTAVYYCAKDSSAFGFVHGAFDIWGQGTLVTVSSGGGGSGGGGSGGGGSALSSELTQDPAASVALGQTVSITCQGDSLRNYWASWYQQKPGQAPVLVIYGKNTRPSGIPDRFSGSTSGNTASLTITGAQAEDEADYYCNSRDSGHRLLFGGGTKLTVLGDVREPKSSDKTHTCPPCPAPELLGGPSVFLFPPKPKDTLMISRTPEVTCVVVDVSHEDPEVKFNWYVDGVEVHNAKTKPREEQYNSTYRVVSVLTVLHQDWLNGKEYKCKVSNKALPAPIEKTISKAKGQPREPQVYTLPPSRDELTKNQVSLTCLVKGFYPSDIAVEWESNGQPENNYKTTPPVLDSDGSFFLYSKLTVDKSRWQQGNVFSCSVMHEALHNHYTQKSLSLSPGK

SEQ ID NO: 599 - DNA, 1515 bp, Artificial Sequence
  source: /note="Description of Artificial Sequence: Synthetic polynucleotide"
atggaagcaccagcgcagcttctcttcctcctgctactctggctcccagataccaccggtgaggtgcagctggtggagtccggagcagaagtcaaaaagcccggagagtctctgaagatctcctgtaaggcttctggatacatctttacgaacaattggatcgcctgggtgcggcagcagcccgggaaaggcctggagtggatgggaatcatctatcctggtgactctgacaccagatacagcccgtccttccagggccgggtcactttctcagccgacacgtccatcaacaccgcctacctccagtggagtagcctgaaggcctcggacaccgccacttactactgtgcgagagaggcctacaactcatacgagtactacggtatggacgtctggggccaagggacaatggtcaccgtctcgagtggaggcggcggttcaggcggaggtggctctggcggtggcggaagtgcacagactgtggtgctccaggagccagcgttctcagtgtcccctggagggacagtcacactcacctgtggcttgagctctggctcagtctctactagttactaccccagttggtaccagcagaccccaggccagcctccacgcacgctcatctacaacacaaacacccgctcttctggggtctctgatcgcttctctggctccatccttgggaacaaagctgccctcaccatcacgggggcccaggccgaagatgaatctgattattactgtgttctgtatatgggtagtggcatttcggtattcggcggggggaccaagctgaccgtcctaggtgacgtacgcgagcccaaatcttctgacaaaactcacacatgcccaccgtgcccagcacctgaactcctgggtggaccgtcagtcttcctcttccccccaaaacccaaggacaccctcatgatctcccggacccctgaggtcacatgcgtggtggtggacgtgagccacgaagaccctgaggtcaagttcaactggtacgtggacggcgtggaggtgcataatgccaagacaaagccgcgggaggagcagtacaacagcacgtaccgtgtggtcagcgtcctcaccgtcctgcaccaggactggctgaatggcaaggagtacaagtgcaaggtctccaacaaagccctcccagcccccatcgagaaaaccatctccaaagccaaagggcagccccgagaaccacaggtgtacaccctgcccccatcccgggatgagctgaccaagaaccaggtcagcctgacctgcctggtcaaaggcttctatccaagcgacatcgccgtggagtgggagagcaatgggcagccggagaacaactacaagaccacgcctcccgtgctggactccgacggctccttcttcctctacagcaagctcaccgtggacaagagcaggtggcagcaggggaacgtcttctcatgctccgtgatgcatgaggctctgcacaaccactacacgcagaagagcctctccctgtctccgggtaaatga

SEQ ID NO: 600 - protein, 504 aa, Artificial Sequence
  source: /note="Description of Artificial Sequence: Synthetic polypeptide"
MEAPAQLLFLLLLWLPDTTGEVQLVESGAEVKKPGESLKISCKASGYIFTNNWIAWVRQQPGKGLEWMGIIYPGDSDTRYSPSFQGRVTFSADTSINTAYLQWSSLKASDTATYYCAREAYNSYEYYGMDVWGQGTMVTVSSGGGGSGGGGSGGGGSAQTVVLQEPAFSVSPGGTVTLTCGLSSGSVSTSYYPSWYQQTPGQPPRTLIYNTNTRSSGVSDRFSGSILGNKAALTITGAQAEDESDYYCVLYMGSGISVFGGGTKLTVLGDVREPKSSDKTHTCPPCPAPELLGGPSVFLFPPKPKDTLMISRTPEVTCVVVDVSHEDPEVKFNWYVDGVEVHNAKTKPREEQYNSTYRVVSVLTVLHQDWLNGKEYKCKVSNKALPAPIEKTISKAKGQPREPQVYTLPPSRDELTKNQVSLTCLVKGFYPSDIAVEWESNGQPENNYKTTPPVLDSDGSFFLYSKLTVDKSRWQQGNVFSCSVMHEALHNHYTQKSLSLSPGK

SEQ ID NO: 601 - DNA, 1503 bp, Artificial Sequence
  source: /note="Description of Artificial Sequence: Synthetic polynucleotide"
atggaagcaccagcgcagcttctcttcctcctgctactctggctcccagataccaccggtgaggtgcagctgttggagtctgggggaggcttggtacagcctggggggtccctgagactctcctgtgcagcctctggattcacctttagcagctatgccatgagctgggtccgccaggctccagggaaggggctggagtgggtctcagctattagtggtagtggtggtagcacatactacgcagactccgtgaagggccggttcaccatctccagagacaattccaagaacacgctgtatctgcaaatgaacagcctgagagccgaggacacggccgtgtattactgtgcgaaagatttctggtttggactaccaccttccttctttgactcttggggccaagggacaatggtcaccgtctcgagtggaggcggcggttcaggcggaggtggctctggcggtggcggaagtgcacagtctgtgctgactcagccaccctcagtgtccgtgtccccaggacagaaggccagcatcacctgctctggagaaagaatgggggataaatatgctgcctggtatcagcagaagccaggccagtcacctatactggtcatctatcaagatacaaagcggccctcagggatccctgagcgattctctggctccaactctgggaacacagccacgttgaccatcagcgggacccaggacatggatgaggctgactattactgtcaggtgtgggacagcagcactggggtattcggcggagggaccaaggtcaccgtcctaggtgacgtacgcgagcccaaatcttctgacaaaactcacacatgcccaccgtgcccagcacctgaactcctgggtggaccgtcagtcttcctcttccccccaaaacccaaggacaccctcatgatctcccggacccctgaggtcacatgcgtggtggtggacgtgagccacgaagaccctgaggtcaagttcaactggtacgtggacggcgtggaggtgcataatgccaagacaaagccgcgggaggagcagtacaacagcacgtaccgtgtggtcagcgtcctcaccgtcctgcaccaggactggctgaatggcaaggagtacaagtgcaaggtctccaacaaagccctcccagcccccatcgagaaaaccatctccaaagccaaagggcagccccgagaaccacaggtgtacaccctgcccccatcccgggatgagctgaccaagaaccaggtcagcctgacctgcctggtcaaaggcttctatccaagcgacatcgccgtggagtgggagagcaatgggcagccggagaacaactacaagaccacgcctcccgtgctggactccgacggctccttcttcctctacagcaagctcaccgtggacaagagcaggtggcagcaggggaacgtcttctcatgctccgtgatgcatgaggctctgcacaaccactacacgcagaagagcctctccctgtctccgggtaaatga

SEQ ID NO: 602 - protein, 500 aa, Artificial Sequence
  source: /note="Description of Artificial Sequence: Synthetic polypeptide"
MEAPAQLLFLLLLWLPDTTGEVQLLESGGGLVQPGGSLRLSCAASGFTFSSYAMSWVRQAPGKGLEWVSAISGSGGSTYYADSVKGRFTISRDNSKNTLYLQMNSLRAEDTAVYYCAKDFWFGLPPSFFDSWGQGTMVTVSSGGGGSGGGGSGGGGSAQSVLTQPPSVSVSPGQKASITCSGERMGDKYAAWYQQKPGQSPILVIYQDTKRPSGIPERFSGSNSGNTATLTISGTQDMDEADYYCQVWDSSTGVFGGGTKVTVLGDVREPKSSDKTHTCPPCPAPELLGGPSVFLFPPKPKDTLMISRTPEVTCVVVDVSHEDPEVKFNWYVDGVEVHNAKTKPREEQYNSTYRVVSVLTVLHQDWLNGKEYKCKVSNKALPAPIEKTISKAKGQPREPQVYTLPPSRDELTKNQVSLTCLVKGFYPSDIAVEWESNGQPENNYKTTPPVLDSDGSFFLYSKLTVDKSRWQQGNVFSCSVMHEALHNHYTQKSLSLSPGK

SEQ ID NO: 603 - DNA, 1512 bp, Artificial Sequence
  source: /note="Description of Artificial Sequence: Synthetic polynucleotide"
atggaagcaccagcgcagcttctcttcctcctgctactctggctcccagataccaccggtgaggtgcagctgttggagtctgggggaggcttggtacagcctggggggtccctgagactctcctgtgcagcctctggattcacctttagcagctatgccatgagctgggtccgccaggctccagggaaggggctggagtgggtctcagctattagtggtagtggtggtagcacatactacgcagactccgtgaagggccggttcaccatctccagagacaattccaagaacacgctgtatctgcaaatgaacagcctgagagccgaggacatggccgtgtattactgtgcgaggactcccgggtatagcagtggctggtactcggtttggggccggggcaccctggtcaccgtctcgagtggaggcggcggttcaggcggaggtggctctggcggtggcggaagtgcacagtctgtcgtgacgcagccgccctcagtgtctggggccccagggcagagggtcaccatctcctgtactgggagcagctccaacatcggggcagggtatgatgttcactggtaccagcaggttccaggaacagcccccaaactcctcatctatggtaacaacaatcggccctcgggggtccctgaccgattctctggctccaagtctggcacctcagcctccctggccatcactgggctccagcctgaggatgaagttgattattactgccagtcctatgaccgcagcctgagtggttatatcttcggaagtgggaccaaggtcaccgtcctaggtgacgtacgcgagcccaaatcttctgacaaaactcacacatgcccaccgtgcccagcacctgaactcctgggtggaccgtcagtcttcctcttccccccaaaacccaaggacaccctcatgatctcccggacccctgaggtcacatgcgtggtggtggacgtgagccacgaagaccctgaggtcaagttcaactggtacgtggacggcgtggaggtgcataatgccaagacaaagccgcgggaggagcagtacaacagcacgtaccgtgtggtcagcgtcctcaccgtcctgcaccaggactggctgaatggcaaggagtacaagtgcaaggtctccaacaaagccctcccagcccccatcgagaaaaccatctccaaagccaaagggcagccccgagaaccacaggtgtacaccctgcccccatcccgggatgagctgaccaagaaccaggtcagcctgacctgcctggtcaaaggcttctatccaagcgacatcgccgtggagtgggagagcaatgggcagccggagaacaactacaagaccacgcctcccgtgctggactccgacggctccttcttcctctacagcaagctcaccgtggacaagagcaggtggcagcaggggaacgtcttctcatgctccgtgatgcatgaggctctgcacaaccactacacgcagaagagcctctccctgtctccgggtaaatga

SEQ ID NO: 604 - protein, 503 aa, Artificial Sequence
  source: /note="Description of Artificial Sequence: Synthetic polypeptide"
MEAPAQLLFLLLLWLPDTTGEVQLLESGGGLVQPGGSLRLSCAASGFTFSSYAMSWVRQAPGKGLEWVSAISGSGGSTYYADSVKGRFTISRDNSKNTLYLQMNSLRAEDMAVYYCARTPGYSSGWYSVWGRGTLVTVSSGGGGSGGGGSGGGGSAQSVVTQPPSVSGAPGQRVTISCTGSSSNIGAGYDVHWYQQVPGTAPKLLIYGNNNRPSGVPDRFSGSKSGTSASLAITGLQPEDEVDYYCQSYDRSLSGYIFGSGTKVTVLGDVREPKSSDKTHTCPPCPAPELLGGPSVFLFPPKPKDTLMISRTPEVTCVVVDVSHEDPEVKFNWYVDGVEVHNAKTKPREEQYNSTYRVVSVLTVLHQDWLNGKEYKCKVSNKALPAPIEKTISKAKGQPREPQVYTLPPSRDELTKNQVSLTCLVKGFYPSDIAVEWESNGQPENNYKTTPPVLDSDGSFFLYSKLTVDKSRWQQGNVFSCSVMHEALHNHYTQKSLSLSPGK

SEQ ID NO: 605 - DNA, 1512 bp, Artificial Sequence
  source: /note="Description of Artificial Sequence: Synthetic polynucleotide"
atggaagcaccagcgcagcttctcttcctcctgctactctggctcccagataccaccggtgaggtgcagctgttggagtctgggggaggcttggtacagcctggggggtccctgagactctcctgtgcagcctctggattcacctttagcagctatgccatgagctgggtccgccaggctccagggaaggggctggagtgggtctcagctattagtggtagtggtggtagcacatactacgcagactccgtgaagggccggttcaccatctccagagacaattccaagaacacgctgtatctgcaaatgaacagcctgagagccgaggacacggccgtgtattactgtgcgaaagatctgaacccttattcagtggtaactctcggtatggacgtctggggcagagggacaatggtcaccgtctcgagtggaggcggcggttcaggcggaggtggctctggcggtggcggaagtgcacagtctgtgctgactcagccaccctcggtgtcagtggccccaggacaggcggccaggattccctgtgggggagacaacattggaagtaagagtgttcactggtaccagcagaggccaggccaggcccctgtcctggtcgtctttgatgatagtgaccggccctcagggatccctgagcgattctctggctccaattctgggcacacggccaccctgaccatcaacagggtcgaacccggggatgaggccgagtattattgtgaggtgtgggatggtggcgagagacatgtggtattcggcggagggaccaagctgaccgtcctaggtgacgtacgcgagcccaaatcttctgacaaaactcacacatgcccaccgtgcccagcacctgaactcctgggtggaccgtcagtcttcctcttccccccaaaacccaaggacaccctcatgatctcccggacccctgaggtcacatgcgtggtggtggacgtgagccacgaagaccctgaggtcaagttcaactggtacgtggacggcgtggaggtgcataatgccaagacaaagccgcgggaggagcagtacaacagcacgtaccgtgtggtcagcgtcctcaccgtcctgcaccaggactggctgaatggcaaggagtacaagtgcaaggtctccaacaaagccctcccagcccccatcgagaaaaccatctccaaagccaaagggcagccccgagaaccacaggtgtacaccctgcccccatcccgggatgagctgaccaagaaccaggtcagcctgacctgcctggtcaaaggcttctatccaagcgacatcgccgtggagtgggagagcaatgggcagccggagaacaactacaagaccacgcctcccgtgctggactccgacggctccttcttcctctacagcaagctcaccgtggacaagagcaggtggcagcaggggaacgtcttctcatgctccgtgatgcatgaggctctgcacaaccactacacgcagaagagcctctccctgtctccgggtaaatga

SEQ ID NO: 606 - protein, 503 aa, Artificial Sequence
  source: /note="Description of Artificial Sequence: Synthetic polypeptide"
MEAPAQLLFLLLLWLPDTTGEVQLLESGGGLVQPGGSLRLSCAASGFTFSSYAMSWVRQAPGKGLEWVSAISGSGGSTYYADSVKGRFTISRDNSKNTLYLQMNSLRAEDTAVYYCAKDLNPYSVVTLGMDVWGRGTMVTVSSGGGGSGGGGSGGGGSAQSVLTQPPSVSVAPGQAARIPCGGDNIGSKSVHWYQQRPGQAPVLVVFDDSDRPSGIPERFSGSNSGHTATLTINRVEPGDEAEYYCEVWDGGERHVVFGGGTKLTVLGDVREPKSSDKTHTCPPCPAPELLGGPSVFLFPPKPKDTLMISRTPEVTCVVVDVSHEDPEVKFNWYVDGVEVHNAKTKPREEQYNSTYRVVSVLTVLHQDWLNGKEYKCKVSNKALPAPIEKTISKAKGQPREPQVYTLPPSRDELTKNQVSLTCLVKGFYPSDIAVEWESNGQPENNYKTTPPVLDSDGSFFLYSKLTVDKSRWQQGNVFSCSVMHEALHNHYTQKSLSLSPGK

SEQ ID NO: 607 - DNA, 1518 bp, Artificial Sequence
  source: /note="Description of Artificial Sequence: Synthetic polynucleotide"
atggaagcaccagcgcagcttctcttcctcctgctactctggctcccagataccaccggtgaggtgcagctgttggagtctgggggaggcttggtacagcctggggggtccctgagactctcctgtgcagcctctggattcacctttagcagctatgccataagctgggtccgccaggctccagggaaggggctggagtgggtctcagctattagtggtagtggtggtagcacatactacgcagactccgtgaagggccggttcaccatctccagagacaattccaagaacacgctgtatctgcaaatgaacagcctgagagccgaggacacggccgtgtattactgtgcgagagattcgagtagggtgggagcttatctggtgtttgactactggggccgggggacaatggtcaccgtctcgagtggaggcggcggttcaggcggaggtggctctggcggtggcggaagtgcacagtctgtgctgacgcagccgccctcagtgtctggggccccagggcagagggtcaccatctcctgcactgggagcagctccaacatcggggcaggttatgatgtacactggtaccagcagcttccaggaacagcccccaaactcctcatctatggtaacagcaaacgcccctcaggggtccctgaccgattctctggctccaagtctggcacctcagcctccctggccctcactgggctccaggctgaggatgaggctgattattactgccagtcctatgacagcagcctgagtggttatgtcttcggaactgggaccaaggtcaccgtcctaggtgacgtacgcgagcccaaatcttctgacaaaactcacacatgcccaccgtgcccagcacctgaactcctgggtggaccgtcagtcttcctcttccccccaaaacccaaggacaccctcatgatctcccggacccctgaggtcacatgcgtggtggtggacgtgagccacgaagaccctgaggtcaagttcaactggtacgtggacggcgtggaggtgcataatgccaagacaaagccgcgggaggagcagtacaacagcacgtaccgtgtggtcagcgtcctcaccgtcctgcaccaggactggctgaatggcaaggagtacaagtgcaaggtctccaacaaagccctcccagcccccatcgagaaaaccatctccaaagccaaagggcagccccgagaaccacaggtgtacaccctgcccccatcccgggatgagctgaccaagaaccaggtcagcctgacctgcctggtcaaaggcttctatccaagcgacatcgccgtggagtgggagagcaatgggcagccggagaacaactacaagaccacgcctcccgtgctggactccgacggctccttcttcctctacagcaagctcaccgtggacaagagcaggtggcagcaggggaacgtcttctcatgctccgtgatgcatgaggctctgcacaaccactacacgcagaagagcctctccctgtctccgggtaaatga

SEQ ID NO: 608 - protein, 505 aa, Artificial Sequence
  source: /note="Description of Artificial Sequence: Synthetic polypeptide"
MEAPAQLLFLLLLWLPDTTGEVQLLESGGGLVQPGGSLRLSCAASGFTFSSYAISWVRQAPGKGLEWVSAISGSGGSTYYADSVKGRFTISRDNSKNTLYLQMNSLRAEDTAVYYCARDSSRVGAYLVFDYWGRGTMVTVSSGGGGSGGGGSGGGGSAQSVLTQPPSVSGAPGQRVTISCTGSSSNIGAGYDVHWYQQLPGTAPKLLIYGNSKRPSGVPDRFSGSKSGTSASLALTGLQAEDEADYYCQSYDSSLSGYVFGTGTKVTVLGDVREPKSSDKTHTCPPCPAPELLGGPSVFLFPPKPKDTLMISRTPEVTCVVVDVSHEDPEVKFNWYVDGVEVHNAKTKPREEQYNSTYRVVSVLTVLHQDWLNGKEYKCKVSNKALPAPIEKTISKAKGQPREPQVYTLPPSRDELTKNQVSLTCLVKGFYPSDIAVEWESNGQPENNYKTTPPVLDSDGSFFLYSKLTVDKSRWQQGNVFSCSVMHEALHNHYTQKSLSLSPGK

SEQ ID NO: 609 - DNA, 1515 bp, Artificial Sequence
  source: /note="Description of Artificial Sequence: Synthetic polynucleotide"
atggaagcaccagcgcagcttctcttcctcctgctactctggctcccagataccaccggtgaggtgcagctgttggagtctgggggaggcttggtacagcctggggggtccctgagactctcctgtgcagcctctggattcacctttagcagctatgccatgagctgggtccgccaggctccagggaaggggctggagtgggtctcagctattagtggtagtggtggtagcacatactacgcagactccgtgaagggccggttcaccatctccagagacaattccaagaacacgctgtatctgcaaatgaacggcctgagagtcgaggacacggccgtgtattactgtgcgaaagaattggtcagtagagggagcctcacctttgactactggggcaaggggacaatggtcaccgtctcgagtggaggcggcggttcaggcggaggtggctctggcggtggcggaagtgcacagtctgtgttgacgcagccgccctcagtgtctggggccccagggcagggggtcaccatctcctgcactgggagcagctccaacatcggggcagattttgctgtacactggtaccaacaacttccagggacagcccccaaactcctcatcaatggtagcagccatcggccctcaggggtccctgaccgattctctggctccaagtctggcccctcagcctccctggccatcactgggctccaagccgacgatgaggctgattatttttgccagtcctatgactacagactcaatgctttagtgttcggcggagggaccaagctgaccgtcctaggtgacgtacgcgagcccaaatcttctgacaaaactcacacatgcccaccgtgcccagcacctgaactcctgggtggaccgtcagtcttcctcttccccccaaaacccaaggacaccctcatgatctcccggacccctgaggtcacatgcgtggtggtggacgtgagccacgaagaccctgaggtcaagttcaactggtacgtggacggcgtggaggtgcataatgccaagacaaagccgcgggaggagcagtacaacagcacgtaccgtgtggtcagcgtcctcaccgtcctgcaccaggactggctgaatggcaaggagtacaagtgcaaggtctccaacaaagccctcccagcccccatcgagaaaaccatctccaaagccaaagggcagccccgagaaccacaggtgtacaccctgcccccatcccgggatgagctgaccaagaaccaggtcagcctgacctgcctggtcaaaggcttctatccaagcgacatcgccgtggagtgggagagcaatgggcagccggagaacaactacaagaccacgcctcccgtgctggactccgacggctccttcttcctctacagcaagctcaccgtggacaagagcaggtggcagcaggggaacgtcttctcatgctccgtgatgcatgaggctctgcacaaccactacacgcagaagagcctctccctgtctccgggtaaatga

SEQ ID NO: 610 - protein, 504 aa, Artificial Sequence [sequence omitted]

SEQ ID NO: 611 - DNA, 1503 bp, Artificial Sequence
  source: /note="Description of Artificial Sequence: Synthetic polynucleotide"
atggaagcaccagcgcagcttctcttcctcctgctactctggctcccagataccaccggtgaggtgcagctgttggagtctgggggaggcttggtacagcctggggggtccctgagactctcctgtgcagcctctggattcacctttagcagctatgccatgagctgggtccgccaggctccagggaaggggctggagtgggtctcagctattagtggtagtggtggtagcacatactacgcagactccgtgaagggccggttcaccatctccagagacaattccaagaacacgctgtatctgcaaatgaacagcctgagagccgaggacacggccgtgtattactgtgcgagagatagacggccgagggatgatgcttttgatatgtgggggagagggaccacggtcaccgtctcgagtggaggcggcggttcaggcggaggtggctctggcggtggcggaagtgcacttaacatccagatgacccagtctccctcttctgtgtctgcttctgttggagacagagtcagcatcacttgtcgggcgagtcagggaattggcagctggttattctggtatcagcagaaaccagggaaagcccctatcctcctgatgtccgctgtgtccggtttgcaaagtggagtcccatcacgattcagcggcagcggatctgggacagatttcactctcacgatcagcagcgtacagcctgaggattttgcaacttactattgtcaacaggctcacagtttccctatcaccttcggccaagggacacgactggagattaaacgtgacgtacgcgagcccaaatcttctgacaaaactcacacatgcccaccgtgcccagcacctgaactcctgggtggaccgtcagtcttcctcttccccccaaaacccaaggacaccctcatgatctcccggacccctgaggtcacatgcgtggtggtggacgtgagccacgaagaccctgaggtcaagttcaactggtacgtggacggcgtggaggtgcataatgccaagacaaagccgcgggaggagcagtacaacagcacgtaccgtgtggtcagcgtcctcaccgtcctgcaccaggactggctgaatggcaaggagtacaagtgcaaggtctccaacaaagccctcccagcccccatcgagaaaaccatctccaaagccaaagggcagccccgagaaccacaggtgtacaccctgcccccatcccgggatgagctgaccaagaaccaggtcagcctgacctgcctggtcaaaggcttctatccaagcgacatcgccgtggagtgggagagcaatgggcagccggagaacaactacaagaccacgcctcccgtgctggactccgacggctccttcttcctctacagcaagctcaccgtggacaagagcaggtggcagcaggggaacgtcttctcatgctccgtgatgcatgaggctctgcacaaccactacacgcagaagagcctctccctgtctccgggtaaatga

SEQ ID NO: 612 - protein, 500 aa, Artificial Sequence
  source: /note="Description of Artificial Sequence: Synthetic polypeptide"
MEAPAQLLFLLLLWLPDTTGEVQLLESGGGLVQPGGSLRLSCAASGFTFSSYAMSWVRQAPGKGLEWVSAISGSGGSTYYADSVKGRFTISRDNSKNTLYLQMNSLRAEDTAVYYCARDRRPRDDAFDMWGRGTTVTVSSGGGGSGGGGSGGGGSALNIQMTQSPSSVSASVGDRVSITCRASQGIGSWLFWYQQKPGKAPILLMSAVSGLQSGVPSRFSGSGSGTDFTLTISSVQPEDFATYYCQQAHSFPITFGQGTRLEIKRDVREPKSSDKTHTCPPCPAPELLGGPSVFLFPPKPKDTLMISRTPEVTCVVVDVSHEDPEVKFNWYVDGVEVHNAKTKPREEQYNSTYRVVSVLTVLHQDWLNGKEYKCKVSNKALPAPIEKTISKAKGQPREPQVYTLPPSRDELTKNQVSLTCLVKGFYPSDIAVEWESNGQPENNYKTTPPVLDSDGSFFLYSKLTVDKSRWQQGNVFSCSVMHEALHNHYTQKSLSLSPGK

SEQ ID NO: 613 - DNA, 1512 bp, Artificial Sequence
  source: /note="Description of Artificial Sequence: Synthetic polynucleotide"
atggaagcaccagcgcagcttctcttcctcctgctactctggctcccagataccaccggtgaggtgcagctgttggagtctgggggaggcttggtacagcctggggggtccctgagactctcctgtgcagcctctggattcacctttagcagctatgccatgagctgggtccgccaggctccagggaaggggctggagtgggtctcagctattagtggtagtggtggtagcacatactccgcagactccgtgaagggccggttcaccatctccagagacaactccaagaacacgctgtatctgcaaatgaacagcctgagagccgaggacacggccgtgtattactgtgcgggaggtagagtgggatctacggcggcttttgatacatgggggcgagggaccacggtcaccgtctcgagtggaggcggcggttcaggcggaggtggctctggcggtggcggaagtgcacaggctgtgctgactcagccgtcctcagtgtctggggccccagggcagagggtcaccatctcctgcactgggagcagctccaacatcggggcaggttatgatgtacactggtaccagcagcttccaggaacagcccccaaactcctcatctatggtaacagcaatcggccctcaggggtccctgaccgattctctggctccaagtctggcacctcagcctccctggccatcactgggctccaggctgaggatgaggctgattattactgccagtcctatgacagcagcctgcgtggttatgtcttcggaactgggaccaagctgaccgtcctaggtgacgtacgcgagcccaaatcttctgacaaaactcacacatgcccaccgtgcccagcacctgaactcctgggtggaccgtcagtcttcctcttccccccaaaacccaaggacaccctcatgatctcccggacccctgaggtcacatgcgtggtggtggacgtgagccacgaagaccctgaggtcaagttcaactggtacgtggacggcgtggaggtgcataatgccaagacaaagccgcgggaggagcagtacaacagcacgtaccgtgtggtcagcgtcctcaccgtcctgcaccaggactggctgaatggcaaggagtacaagtgcaaggtctccaacaaagccctcccagcccccatcgagaaaaccatctccaaagccaaagggcagccccgagaaccacaggtgtacaccctgcccccatcccgggatgagctgaccaagaaccaggtcagcctgacctgcctggtcaaaggcttctatccaagcgacatcgccgtggagtgggagagcaatgggcagccggagaacaactacaagaccacgcctcccgtgctggactccgacggctccttcttcctctacagcaagctcaccgtggacaagagcaggtggcagcaggggaacgtcttctcatgctccgtgatgcatgaggctctgcacaaccactacacgcagaagagcctctccctgtctccgggtaaatga

SEQ ID NO: 614 - protein, 503 aa, Artificial Sequence
  source: /note="Description of Artificial Sequence: Synthetic polypeptide"
MEAPAQLLFLLLLWLPDTTGEVQLLESGGGLVQPGGSLRLSCAASGFTFSSYAMSWVRQAPGKGLEWVSAISGSGGSTYSADSVKGRFTISRDNSKNTLYLQMNSLRAEDTAVYYCAGGRVGSTAAFDTWGRGTTVTVSSGGGGSGGGGSGGGGSAQAVLTQPSSVSGAPGQRVTISCTGSSSNIGAGYDVHWYQQLPGTAPKLLIYGNSNRPSGVPDRFSGSKSGTSASLAITGLQAEDEADYYCQSYDSSLRGYVFGTGTKLTVLGDVREPKSSDKTHTCPPCPAPELLGGPSVFLFPPKPKDTLMISRTPEVTCVVVDVSHEDPEVKFNWYVDGVEVHNAKTKPREEQYNSTYRVVSVLTVLHQDWLNGKEYKCKVSNKALPAPIEKTISKAKGQPREPQVYTLPPSRDELTKNQVSLTCLVKGFYPSDIAVEWESNGQPENNYKTTPPVLDSDGSFFLYSKLTVDKSRWQQGNVFSCSVMHEALHNHYTQKSLSLSPGK

SEQ ID NO: 615 - DNA, 1518 bp, Artificial Sequence
  source: /note="Description of Artificial Sequence: Synthetic polynucleotide"
atggaagcaccagcgcagcttctcttcctcctgctactctggctcccagataccaccggtgaggtgcagctgttggagtctgggggaggcttggtacagcctggggggtccctgagactctcctgtgcagcctctggattcacctttagcagctatgccatgagctgggtccgccaggctccagggaaggggctggagtgggtctcagctattagtggtagtggtggtagcacatactacgcagactccgtgaagggccggttcaccatctccagagacaattccaagaacacgctgtatctgcaaatgaacagcctgagagccgaggacacggccgtgtattactgtgcgagagatcgagccctagtgggagctactcgaacttttggctactgggggcaggggaccacggtcaccgtctcgagtggaggcggcggttcaggcggaggtggctctggcggtggcggaagtgcacaggctgtgctgactcagccgtcctcagtgtctggggccccagggcagagggtcaccatctcctgcactgggagcagctccaacatcggggcaggttatgatgtacactggtaccagcagcttccaggaacagcccccaaactcctcatctatggtgacaccaatcggccctcaggggtccctgaccgattctctggctccaagtctggcacctcagcctccctggccatcactgggctccaggctgaggatgaggctgattattactgccagtcctttgacagcagcctcagtggttcggtgttcggcggagggaccaagctgaccgtcctaggtgacgtacgcgagcccaaatcttctgacaaaactcacacatgcccaccgtgcccagcacctgaactcctgggtggaccgtcagtcttcctcttccccccaaaacccaaggacaccctcatgatctcccggacccctgaggtcacatgcgtggtggtggacgtgagccacgaagaccctgaggtcaagttcaactggtacgtggacggcgtggaggtgcataatgccaagacaaagccgcgggaggagcagtacaacagcacgtaccgtgtggtcagcgtcctcaccgtcctgcaccaggactggctgaatggcaaggagtacaagtgcaaggtctccaacaaagccctcccagcccccatcgagaaaaccatctccaaagccaaagggcagccccgagaaccacaggtgtacaccctgcccccatcccgggatgagctgaccaagaaccaggtcagcctgacctgcctggtcaaaggcttctatccaagcgacatcgccgtggagtgggagagcaatgggcagccggagaacaactacaagaccacgcctcccgtgctggactccgacggctccttcttcctctacagcaagctcaccgtggacaagagcaggtggcagcaggggaacgtcttctcatgctccgtgatgcatgaggctctgcacaaccactacacgcagaagagcctctccctgtctccgggtaaatga

SEQ ID NO: 616 - protein, 505 aa, Artificial Sequence [sequence omitted]

SEQ ID NO: 617 - DNA, 1533 bp, Artificial Sequence
  source: /note="Description of Artificial Sequence: Synthetic polynucleotide"
atggaagcaccagcgcagcttctcttcctcctgctactctggctcccagataccaccggtgaggtgcagctgttggagtctgggggaggcttggtacagcctggggggtccctgagactctcctgtgcagcctctggattcacctttagcagctatgccatgagctgggtccgccaggctccagggaaggggctggagtgggtctcagctattagtggtagtggtggtagcacatactacgcagactccgtgaagggccggttcaccatctccagagacaattccaagaacacgctgtatctgcaaatgaacagcctgagagccgaggacacggccgtgtattactgtgcgagagttgggtcgtttggtgattacaaagataaaagtggttacggcttctactttgactactggggccaaggcaccctggtcaccgtctcgagtggaggcggcggttcaggcggaggtggctctggcggtggcggaagtgcacagtctgtgctgactcagccaccctcggcgtctgggaccctcgggcagacggtcttcatctcttgttctggaagcagttccaacatcggaagtaattctgtgagttggtaccagcagctcccaggaacggcccccaaatttctcatttatcataataatcagcggccctcaggggtccctgagcgattctctggctccaagtctggcacctcagcctccctggccatccgtgggctccagtctgaggatgaggctgattactactgtgcatcttgggaggacagcctgaatggttgggtgttcggcggggggaccaagctgaccgtcctaggtgacgtacgcgagcccaaatcttctgacaaaactcacacatgcccaccgtgcccagcacctgaactcctgggtggaccgtcagtcttcctcttccccccaaaacccaaggacaccctcatgatctcccggacccctgaggtcacatgcgtggtggtggacgtgagccacgaagaccctgaggtcaagttcaactggtacgtggacggcgtggaggtgcataatgccaagacaaagccgcgggaggagcagtacaacagcacgtaccgtgtggtcagcgtcctcaccgtcctgcaccaggactggctgaatggcaaggagtacaagtgcaaggtctccaacaaagccctcccagcccccatcgagaaaaccatctccaaagccaaagggcagccccgagaaccacaggtgtacaccctgcccccatcccgggatgagctgaccaagaaccaggtcagcctgacctgcctggtcaaaggcttctatccaagcgacatcgccgtggagtgggagagcaatgggcagccggagaacaactacaagaccacgcctcccgtgctggactccgacggctccttcttcctctacagcaagctcaccgtggacaagagcaggtggcagcaggggaacgtcttctcatgctccgtgatgcatgaggctctgcacaaccactacacgcagaagagcctctccctgtctccgggtaaatga

SEQ ID NO: 618 - protein, 510 aa, Artificial Sequence [sequence omitted]

SEQ ID NO: 619 - DNA, 1512 bp, Artificial Sequence
  source: /note="Description of Artificial Sequence: Synthetic polynucleotide"
atggaagcaccagcgcagcttctcttcctcctgctactctggctcccagataccaccggtgaggtgcagctgttggagtctgggggaggcttggtacagcctggggggtccctgagactctcctgtgcagcctctggattcacctttagcagctatgccatgagctgggtccgccaggctccagggaaggggctggagtgggtctcagctattagtggtagtggtggtagcacatactacgcagactccgtgaagggccggttcaccatctccagagacaattccaagaacacgctgtatctgcaaatgaacagcctgagagccgaggacacggccgtgtattactgtgcgggaggtagagtgggatctacggcggcttttgatacatggggccaggggacaatggtcaccgtctcgagtggaggcggcggttcaggcggaggtggctctggcggtggcggaagtgcacagtctgtgttaacgcagccgccctcagtgtctggggccccagggcagagggtcgccatatcctgtacggggagcagctccaatattggggcaggttatgatgtacactggtttcagcaacttccaggaacagcccccaaactcctcatctttggtaacaagaatcggccctcaggggtccccgaccgattctctgcctctaagtctggcaccgcagcctccctggccatcactgggctccaggctgaggatgagggtgattattactgccagtcctatgacagcagcctgagtggtgtgatcttcggcagagggaccaagctgaccgtcctaggtgacgtacgcgagcccaaatcttctgacaaaactcacacatgcccaccgtgcccagcacctgaactcctgggtggaccgtcagtcttcctcttccccccaaaacccaaggacaccctcatgatctcccggacccctgaggtcacatgcgtggtggtggacgtgagccacgaagaccctgaggtcaagttcaactggtacgtggacggcgtggaggtgcataatgccaagacaaagccgcgggaggagcagtacaacagcacgtaccgtgtggtcagcgtcctcaccgtcctgcaccaggactggctgaatggcaaggagtacaagtgcaaggtctccaacaaagccctcccagcccccatcgagaaaaccatctccaaagccaaagggcagccccgagaaccacaggtgtacaccctgcccccatcccgggatgagctgaccaagaaccaggtcagcctgacctgcctggtcaaaggcttctatccaagcgacatcgccgtggagtgggagagcaatgggcagccggagaacaactacaagaccacgcctcccgtgctggactccgacggctccttcttcctctacagcaagctcaccgtggacaagagcaggtggcagcaggggaacgtcttctcatgctccgtgatgcatgaggctctgcacaaccactacacgcagaagagcctctccctgtctccgggtaaatga

SEQ ID NO: 620 - protein, 503 aa, Artificial Sequence
  source: /note="Description of Artificial Sequence: Synthetic polypeptide"
MEAPAQLLFLLLLWLPDTTGEVQLLESGGGLVQPGGSLRLSCAASGFTFSSYAMSWVRQAPGKGLEWVSAISGSGGSTYYADSVKGRFTISRDNSKNTLYLQMNSLRAEDTAVYYCAGGRVGSTAAFDTWGQGTMVTVSSGGGGSGGGGSGGGGSAQSVLTQPPSVSGAPGQRVAISCTGSSSNIGAGYDVHWFQQLPGTAPKLLIFGNKNRPSGVPDRFSASKSGTAASLAITGLQAEDEGDYYCQSYDSSLSGVIFGRGTKLTVLGDVREPKSSDKTHTCPPCPAPELLGGPSVFLFPPKPKDTLMISRTPEVTCVVVDVSHEDPEVKFNWYVDGVEVHNAKTKPREEQYNSTYRVVSVLTVLHQDWLNGKEYKCKVSNKALPAPIEKTISKAKGQPREPQVYTLPPSRDELTKNQVSLTCLVKGFYPSDIAVEWESNGQPENNYKTTPPVLDSDGSFFLYSKLTVDKSRWQQGNVFSCSVMHEALHNHYTQKSLSLSPGK

SEQ ID NO: 621 - DNA, 1509 bp, Artificial Sequence
  source: /note="Description of Artificial Sequence: Synthetic polynucleotide"
atggaagcaccagcgcagcttctcttcctcctgctactctggctcccagataccaccggtgaggtgcagctgttggagtctgggggaggcttggtacagcctggggggtccctgagactctcctgtgcagcctctggattcacctttagcagctatgccatgagctgggtccgccaggctccagggaaggggctggagtgggtctcagctattagtggtagtggtggtagcacatactacgcagactccgtgaagggccggttcaccatctccagagacaattccaagaacacgctgtatctgcaaatgaacagcctgagagccgaggacacggccgtgtattactgtgcgggagcggcggactacagtaattactttgacttttggggccaagggacaatggtcaccgtctcgagtggaggcggcggttcaggcggaggtggctctggcggtggcggaagtgcacagtctgtgctgactcagccaccctcagtgtctggggccccagggcagagggtcaccatctcctgcactgggagcagctccaacatcggggcaggttatgatgtacactggtaccagcaacttccaggagcagcccccaaactcctcatctatgggaacatcaatcggccctcaggggtccctgaccgattctctggctccaagtctggcacctcagcctccctggccatcactgggctccaggctgaggatgagggtgattattactgccagtcctatgacagaagcctgagtgctaagctgttcggcggagggaccaaggtcaccgtcctaggtgacgtacgcgagcccaaatcttctgacaaaactcacacatgcccaccgtgcccagcacctgaactcctgggtggaccgtcagtcttcctcttccccccaaaacccaaggacaccctcatgatctcccggacccctgaggtcacatgcgtggtggtggacgtgagccacgaagaccctgaggtcaagttcaactggtacgtggacggcgtggaggtgcataatgccaagacaaagccgcgggaggagcagtacaacagcacgtaccgtgtggtcagcgtcctcaccgtcctgcaccaggactggctgaatggcaaggagtacaagtgcaaggtctccaacaaagccctcccagcccccatcgagaaaaccatctccaaagccaaagggcagccccgagaaccacaggtgtacaccctgcccccatcccgggatgagctgaccaagaaccaggtcagcctgacctgcctggtcaaaggcttctatccaagcgacatcgccgtggagtgggagagcaatgggcagccggagaacaactacaagaccacgcctcccgtgctggactccgacggctccttcttcctctacagcaagctcaccgtggacaagagcaggtggcagcaggggaacgtcttctcatgctccgtgatgcatgaggctctgcacaaccactacacgcagaagagcctctccctgtctccgggtaaatga

SEQ ID NO: 622 - protein, 502 aa, Artificial Sequence
  source: /note="Description of Artificial Sequence: Synthetic polypeptide"
MEAPAQLLFLLLLWLPDTTGEVQLLESGGGLVQPGGSLRLSCAASGFTFSSYAMSWVRQAPGKGLEWVSAISGSGGSTYYADSVKGRFTISRDNSKNTLYLQMNSLRAEDTAVYYCAGAADYSNYFDFWGQGTMVTVSSGGGGSGGGGSGGGGSAQSVLTQPPSVSGAPGQRVTISCTGSSSNIGAGYDVHWYQQLPGAAPKLLIYGNINRPSGVPDRFSGSKSGTSASLAITGLQAEDEGDYYCQSYDRSLSAKLFGGGTKVTVLGDVREPKSSDKTHTCPPCPAPELLGGPSVFLFPPKPKDTLMISRTPEVTCVVVDVSHEDPEVKFNWYVDGVEVHNAKTKPREEQYNSTYRVVSVLTVLHQDWLNGKEYKCKVSNKALPAPIEKTISKAKGQPREPQVYTLPPSRDELTKNQVSLTCLVKGFYPSDIAVEWESNGQPENNYKTTPPVLDSDGSFFLYSKLTVDKSRWQQGNVFSCSVMHEALHNHYTQKSLSLSPGK

SEQ ID NO: 623 - DNA, 1506 bp, Artificial Sequence
  source: /note="Description of Artificial Sequence: Synthetic polynucleotide"
atggaagcaccagcgcagcttctcttcctcctgctactctggctcccagataccaccggtgaggtgcagctgttggagtctgggggaggcttggtacagcctggggggtccctgagactctcctgtgcagcctctggattcacctttagcagctatgccatgagctgggtccgccaggctccagggaaggggctggagtgggtctcagctattagtggtagtggtggtagcacatactacgcagactccgtgaagggccggttcaccatctccagagacaattccaagaacacgctgtatctgcaaatgaacagcctgagagccgaggacacggccgtgtattactgtgcggcgagtaatagttattactactttgactactggggccagggaaccctggtcaccgtctcgagtggaggcggcggttcaggcggaggtggctctggcggtggcggaagtgcactttcttctgagctgactcaggaccctgctgtgtctgtggccttgggacagacagtcaggatcacatgccaaggagacagcctcagaaacttttatccaagttggtatcagcagaagccaggacaggcccctgttcttgtcatttatggtaaaaatattcggccctcagggatcccagaccgattctctggctccggctcaggaagcacagcttccttgaccatcactggggctcaggcggaagatgaggctgactattactgtaactcccgggacagcagtggtaaacatatgggggtggtattcggcggagggaccaagctgaccgtcctaggtgacgtacgcgagcccaaatcttctgacaaaactcacacatgcccaccgtgcccagcacctgaactcctgggtggaccgtcagtcttcctcttccccccaaaacccaaggacaccctcatgatctcccggacccctgaggtcacatgcgtggtggtggacgtgagccacgaagaccctgaggtcaagttcaactggtacgtggacggcgtggaggtgcataatgccaagacaaagccgcgggaggagcagtacaacagcacgtaccgtgtggtcagcgtcctcaccgtcctgcaccaggactggctgaatggcaaggagtacaagtgcaaggtctccaacaaagccctcccagcccccatcgagaaaaccatctccaaagccaaagggcagccccgagaaccacaggtgtacaccctgcccccatcccgggatgagctgaccaagaaccaggtcagcctgacctgcctggtcaaaggcttctatccaagcgacatcgccgtggagtgggagagcaatgggcagccggagaacaactacaagaccacgcctcccgtgctggactccgacggctccttcttcctctacagcaagctcaccgtggacaagagcaggtggcagcaggggaacgtcttctcatgctccgtgatgcatgaggctctgcacaaccactacacgcagaagagcctctccctgtctccgggtaaatga

SEQ ID NO: 624 - protein, 501 aa, Artificial Sequence
  source: /note="Description of Artificial Sequence: Synthetic polypeptide"
MEAPAQLLFLLLLWLPDTTGEVQLLESGGGLVQPGGSLRLSCAASGFTFSSYAMSWVRQAPGKGLEWVSAISGSGGSTYYADSVKGRFTISRDNSKNTLYLQMNSLRAEDTAVYYCAASNSYYYFDYWGQGTLVTVSSGGGGSGGGGSGGGGSALSSELTQDPAVSVALGQTVRITCQGDSLRNFYPSWYQQKPGQAPVLVIYGKNIRPSGIPDRFSGSGSGSTASLTITGAQAEDEADYYCNSRDSSGKHMGVVFGGGTKLTVLGDVREPKSSDKTHTCPPCPAPELLGGPSVFLFPPKPKDTLMISRTPEVTCVVVDVSHEDPEVKFNWYVDGVEVHNAKTKPREEQYNSTYRVVSVLTVLHQDWLNGKEYKCKVSNKALPAPIEKTISKAKGQPREPQVYTLPPSRDELTKNQVSLTCLVKGFYPSDIAVEWESNGQPENNYKTTPPVLDSDGSFFLYSKLTVDKSRWQQGNVFSCSVMHEALHNHYTQKSLSLSPGK

SEQ ID NO: 625 - DNA, 1524 bp, Artificial Sequence
  source: /note="Description of Artificial Sequence: Synthetic polynucleotide"
atggaagcaccagcgcagcttctcttcctcctgctactctggctcccagataccaccggtgaggtgcagctgttggagtctgggggaggcttggtacagcctggggggtccctgagactctcctgtgcagcctctggattcacctttagcagctatgccatgagctgggtccgccaggctccagggaaggggctggagtgggtctcagctattagtggtagtggtggtagcacatactacgcagactccgtgaagggccggttcaccatctccagagacaattccaagaacgcgctgtatctgcaaatgaacagcctgagagccgaggacacggccgtgtattactgtgcgagagatctgggaatagaccccctttggagtggttattacacaccccttgactattggggccgggggacaatggtcaccgtctcgagtggaggcggcggttcaggcggaggtggctctggcggtggcggaagtgcactttcttctgagctgactcaggaccctgctctgtcggtggccttgggacagacagtcaggatcacatgtcaaggggacagcctcggaggctttcatgcaagctggtaccaggagaagccaggacaggcccctgtatttgtcctctatggtaaaaacaaccggccctcagggatcccagaccgattctctggctccacctcaggtaacacagctgccctgaccatcactggggctcaggcggaagatgaggctgactattactgtagctcccgggacagaagtggtaaccatcgcgtcttcggcggagggaccaagctgaccgtcctaggtgacgtacgcgagcccaaatcttctgacaaaactcacacatgcccaccgtgcccagcacctgaactcctgggtggaccgtcagtcttcctcttccccccaaaacccaaggacaccctcatgatctcccggacccctgaggtcacatgcgtggtggtggacgtgagccacgaagaccctgaggtcaagttcaactggtacgtggacggcgtggaggtgcataatgccaagacaaagccgcgggaggagcagtacaacagcacgtaccgtgtggtcagcgtcctcaccgtcctgcaccaggactggctgaatggcaaggagtacaagtgcaaggtctccaacaaagccctcccagcccccatcgagaaaaccatctccaaagccaaagggcagccccgagaaccacaggtgtacaccctgcccccatcccgggatgagctgaccaagaaccaggtcagcctgacctgcctggtcaaaggcttctatccaagcgacatcgccgtggagtgggagagcaatgggcagccggagaacaactacaagaccacgcctcccgtgctggactccgacggctccttcttcctctacagcaagctcaccgtggacaagagcaggtggcagcaggggaacgtcttctcatgctccgtgatgcatgaggctctgcacaaccactacacgcagaagagcctctccctgtctccgggtaaatga

SEQ ID NO: 626 - protein, 507 aa, Artificial Sequence
  source: /note="Description of Artificial Sequence: Synthetic polypeptide"
MEAPAQLLFLLLLWLPDTTGEVQLLESGGGLVQPGGSLRLSCAASGFTFSSYAMSWVRQAPGKGLEWVSAISGSGGSTYYADSVKGRFTISRDNSKNALYLQMNSLRAEDTAVYYCARDLGIDPLWSGYYTPLDYWGRGTMVTVSSGGGGSGGGGSGGGGSALSSELTQDPALSVALGQTVRITCQGDSLGGFHASWYQEKPGQAPVFVLYGKNNRPSGIPDRFSGSTSGNTAALTITGAQAEDEADYYCSSRDRSGNHRVFGGGTKLTVLGDVREPKSSDKTHTCPPCPAPELLGGPSVFLFPPKPKDTLMISRTPEVTCVVVDVSHEDPEVKFNWYVDGVEVHNAKTKPREEQYNSTYRVVSVLTVLHQDWLNGKEYKCKVSNKALPAPIEKTISKAKGQPREPQVYTLPPSRDELTKNQVSLTCLVKGFYPSDIAVEWESNGQPENNYKTTPPVLDSDGSFFLYSKLTVDKSRWQQGNVFSCSVMHEALHNHYTQKSLSLSPGK

SEQ ID NO: 627 - DNA, 1503 bp, Artificial Sequence
  source: /note="Description of Artificial Sequence: Synthetic polynucleotide"
atggaagcaccagcgcagcttctcttcctcctgctactctggctcccagataccaccggtgaggtgcagctgttggagtctgggggaggcttggtacagcctggggggtccctgagactctcctgtgcagcctctggattcacctttagcagctatgccatgagctgggtccgccaggctccagggaaggggctggagtgggtctcagctattagtggtagtggtggtagcacatactacgcagactccgtgaagggccggttcaccatctccagagacaattccaagaacacgctgtatctgcaaatgaacagcctgagagccgaggacacggccgtgtattactgtgcgaggggctacagtggaagttcctttgacgcctggggccaagggacaatggtcaccgtctcgagtggaggcggcggttcaggcggaggtggctctggcggtggcggaagtgcacagtctgtgttgacgcagccgccatcagcgtccgggacccccgggcagagggtcaccatctcttgttctggaagcagctccaatatcggaagtaagtctgtatactggtaccagcaactcccaggagcggcccccaaactcctcatctacaggaatagtcagcggccctcaggggtccctgaccgattctctgcctccaagtctggcacctctgcctccctggccatcagtgggctccggtccgaggatgaggctgactattactgtgcagcatgggatggcagcctgagtggacatttcttcggaactgggaccaagctgaccgtcctaggtgacgtacgcgagcccaaatcttctgacaaaactcacacatgcccaccgtgcccagcacctgaactcctgggtggaccgtcagtcttcctcttccccccaaaacccaaggacaccctcatgatctcccggacccctgaggtcacatgcgtggtggtggacgtgagccacgaagaccctgaggtcaagttcaactggtacgtggacggcgtggaggtgcataatgccaagacaaagccgcgggaggagcagtacaacagcacgtaccgtgtggtcagcgtcctcaccgtcctgcaccaggactggctgaatggcaaggagtacaagtgcaaggtctccaacaaagccctcccagcccccatcgagaaaaccatctccaaagccaaagggcagccccgagaaccacaggtgtacaccctgcccccatcccgggatgagctgaccaagaaccaggtcagcctgacctgcctggtcaaaggcttctatccaagcgacatcgccgtggagtgggagagcaatgggcagccggagaacaactacaagaccacgcctcccgtgctggactccgacggctccttcttcctctacagcaagctcaccgtggacaagagcaggtggcagcaggggaacgtcttctcatgctccgtgatgcatgaggctctgcacaaccactacacgcagaagagcctctccctgtctccgggtaaatga

SEQ ID NO: 628 - protein, 500 aa, Artificial Sequence
  source: /note="Description of Artificial Sequence: Synthetic polypeptide"
MEAPAQLLFLLLLWLPDTTGEVQLLESGGGLVQPGGSLRLSCAASGFTFSSYAMSWVRQAPGKGLEWVSAISGSGGSTYYADSVKGRFTISRDNSKNTLYLQMNSLRAEDTAVYYCARGYSGSSFDAWGQGTMVTVSSGGGGSGGGGSGGGGSAQSVLTQPPSASGTPGQRVTISCSGSSSNIGSKSVYWYQQLPGAAPKLLIYRNSQRPSGVPDRFSASKSGTSASLAISGLRSEDEADYYCAAWDGSLSGHFFGTGTKLTVLGDVREPKSSDKTHTCPPCPAPELLGGPSVFLFPPKPKDTLMISRTPEVTCVVVDVSHEDPEVKFNWYVDGVEVHNAKTKPREEQYNSTYRVVSVLTVLHQDWLNGKEYKCKVSNKALPAPIEKTISKAKGQPREPQVYTLPPSRDELTKNQVSLTCLVKGFYPSDIAVEWESNGQPENNYKTTPPVLDSDGSFFLYSKLTVDKSRWQQGNVFSCSVMHEALHNHYTQKSLSLSPGK

SEQ ID NO: 629 - DNA, 1515 bp, Artificial Sequence
  source: /note="Description of Artificial Sequence: Synthetic polynucleotide"
atggaagcaccagcgcagcttctcttcctcctgctactctggctcccagataccaccggtgaggtgcagctgttggagtctgggggaggcttggtacagcctggggggtccctgagactctcctgtgcagcctctggattcacctttagcagctatgccatgagctgggtccgccaggctccagggaaggggctggagtgggtctcagctattagtggtagtggtggtagcacatactacgcagactccgtgaagggccggttcaccatctccagagacaattccaagaacacgctgtatctgcaaatgaacagcctgagagccgaggacacggccgtgtattactgtgggagaggcagcagagtggggacgatttggggaagccttgacttttggggccaagggacaatggtcaccgtctcgagtggaggcggcggttcaggcggaggtggctctggcggtggcggaagtgcacagtctgtgctgacgcagccgccctcagtgtctgcggccccgggacagagggtcaccatctcctgctctggaaagagctccaacattggcggtaattctgtggcctggtaccagcaactcccgggaacagcccccaaagtcctcatttatgacaatgataagcgaccctcaggggttcctgaccgattctctggctccaagtctggcacgtcagccaccctgggcatcaccggactgcagactggggacgaggccgattattactgcggatcctgggatagcagcctgggtgttgggatgttcggcggagggaccaaggtcaccgtcctaggtgacgtacgcgagcccaaatcttctgacaaaactcacacatgcccaccgtgcccagcacctgaactcctgggtggaccgtcagtcttcctcttccccccaaaacccaaggacaccctcatgatctcccggacccctgaggtcacatgcgtggtggtggacgtgagccacgaagaccctgaggtcaagttcaactggtacgtggacggcgtggaggtgcataatgccaagacaaagccgcgggaggagcagtacaacagcacgtaccgtgtggtcagcgtcctcaccgtcctgcaccaggactggctgaatggcaaggagtacaagtgcaaggtctccaacaaagccctcccagcccccatcgagaaaaccatctccaaagccaaagggcagccccgagaaccacaggtgtacaccctgcccccatcccgggatgagctgaccaagaaccaggtcagcctgacctgcctggtcaaaggcttctatccaagcgacatcgccgtggagtgggagagcaatgggcagccggagaacaactacaagaccacgcctcccgtgctggactccgacggctccttcttcctctacagcaagctcaccgtggacaagagcaggtggcagcaggggaacgtcttctcatgctccgtgatgcatgaggctctgcacaaccactacacgcagaagagcctctccctgtctccgggtaaatga

SEQ ID NO: 630 - protein, 504 aa, Artificial Sequence
  source: /note="Description of Artificial Sequence: Synthetic polypeptide"
MEAPAQLLFLLLLWLPDTTGEVQLLESGGGLVQPGGSLRLSCAASGFTFSSYAMSWVRQAPGKGLEWVSAISGSGGSTYYADSVKGRFTISRDNSKNTLYLQMNSLRAEDTAVYYCGRGSRVGTIWGSLDFWGQGTMVTVSSGGGGSGGGGSGGGGSAQSVLTQPPSVSAAPGQRVTISCSGKSSNIGGNSVAWYQQLPGTAPKVLIYDNDKRPSGVPDRFSGSKSGTSATLGITGLQTGDEADYYCGSWDSSLGVGMFGGGTKVTVLGDVREPKSSDKTHTCPPCPAPELLGGPSVFLFPPKPKDTLMISRTPEVTCVVVDVSHEDPEVKFNWYVDGVEVHNAKTKPREEQYNSTYRVVSVLTVLHQDWLNGKEYKCKVSNKALPAPIEKTISKAKGQPREPQVYTLPPSRDELTKNQVSLTCLVKGFYPSDIAVEWESNGQPENNYKTTPPVLDSDGSFFLYSKLTVDKSRWQQGNVFSCSVMHEALHNHYTQKSLSLSPGK

SEQ ID NO: 631 - DNA, 1533 bp, Artificial Sequence
  source: /note="Description of Artificial Sequence: Synthetic polynucleotide"
atggaagcaccagcgcagcttctcttcctcctgctactctggctcccagataccaccggtgaggtgcagctgttggagtctgggggaggcttggtacagcctggggggtccctgagactctcctgtgcagcctctggattcacctttagcagctatgccatgagctgggtccgccaggctccagggaaggggctggagtgggtctcagctattagtggtagtggtggtagcacatactacgcagactccgtgaagggccggttcaccatctccagagacaattccaagaacacgctgtatctgcaaatgaacagcctgagagccgaggacacggccgtgtattactgtgcgagagatcgcgtttacgatttttggagtggttattatacgaggtacaactggttcgacccctgggggcgagggaccacggtcaccgtctcgagtggaggcggcggttcaggcggaggtggctctggcggtggcggaagtgcacaggctgtgctgactcagccgtcctcagcgtctgggacccccgggcagagggtcaccatctcttgttctggaagcagctccaacatcggaagtaattatgtatactggtaccagcagctcccaggaacggcccccaaactcctcatctataggaataatcagcggccctcaggggtccctgaccgattctctggctccaagtctggcacctcagcctccctggccatcagtgggctccggtccgaggatgaggctgattattactgtgcagcatgggatgacagcctgagtagtccggtgttcggcggagggaccaaggtcaccgtcctaggtgacgtacgcgagcccaaatcttctgacaaaactcacacatgcccaccgtgcccagcacctgaactcctgggtggaccgtcagtcttcctcttccccccaaaacccaaggacaccctcatgatctcccggacccctgaggtcacatgcgtggtggtggacgtgagccacgaagaccctgaggtcaagttcaactggtacgtggacggcgtggaggtgcataatgccaagacaaagccgcgggaggagcagtacaacagcacgtaccgtgtggtcagcgtcctcaccgtcctgcaccaggactggctgaatggcaaggagtacaagtgcaaggtctccaacaaagccctcccagcccccatcgagaaaaccatctccaaagccaaagggcagccccgagaaccacaggtgtacaccctgcccccatcccgggatgagctgaccaagaaccaggtcagcctgacctgcctggtcaaaggcttctatccaagcgacatcgccgtggagtgggagagcaatgggcagccggagaacaactacaagaccacgcctcccgtgctggactccgacggctccttcttcctctacagcaagctcaccgtggacaagagcaggtggcagcaggggaacgtcttctcatgctccgtgatgcatgaggctctgcacaaccactacacgcagaagagcctctccctgtctccgggtaaatga

SEQ ID NO: 632 - protein, 510 aa, Artificial Sequence [sequence omitted]

SEQ ID NO: 633 - DNA, 1503 bp, Artificial Sequence
  source: /note="Description of Artificial Sequence: Synthetic polynucleotide"
atggaagcaccagcgcagcttctcttcctcctgctactctggctcccagataccaccggtgaggtgcagctgttggagtctgggggaggcttggtacagcctggggggtccctgagactctcctgtgcagcctctggattcacctttagcagctatgccatgagctgggtccgccagactccagggaaggggctggagtgggtctcagctattagtggtagtggtggtagcacatactacgcaaactccgtgaagggccggttcaccatctccagagacaattccaagaacacgctgtatctgcaaatgaacagcctgagagccgaggacacggccgtgtattactgtgcgcgggggggaggctacaacccttttgactcctggggccaggggacaatggtcaccgtctcgagtggaggcggcggttcaggcggaggtggctctggcggtggcggaagtgcacagtctgccctgactcagcctgcctccgtgtctgggtctcctggacagtcgatcaccatctcctgcactggaaccggcagtgacgttggtggttataactatgtctcctggtaccaacagcacccaggcaaagcccccaaactcatgatttatgaggtcattaatcggccctcagggatttctaatcgcttctctggctccaagtctggcaacacggcctccctgaccatctctgggctccaggctgaggacgaggctgattattactgcggctcatattcaagcagcagcactcttgtattcggcggagggaccaagctgaccgtcctaggtgacgtacgcgagcccaaatcttctgacaaaactcacacatgcccaccgtgcccagcacctgaactcctgggtggaccgtcagtcttcctcttccccccaaaacccaaggacaccctcatgatctcccggacccctgaggtcacatgcgtggtggtggacgtgagccacgaagaccctgaggtcaagttcaactggtacgtggacggcgtggaggtgcataatgccaagacaaagccgcgggaggagcagtacaacagcacgtaccgtgtggtcagcgtcctcaccgtcctgcaccaggactggctgaatggcaaggagtacaagtgcaaggtctccaacaaagccctcccagcccccatcgagaaaaccatctccaaagccaaagggcagccccgagaaccacaggtgtacaccctgcccccatcccgggatgagctgaccaagaaccaggtcagcctgacctgcctggtcaaaggcttctatccaagcgacatcgccgtggagtgggagagcaatgggcagccggagaacaactacaagaccacgcctcccgtgctggactccgacggctccttcttcctctacagcaagctcaccgtggacaagagcaggtggcagcaggggaacgtcttctcatgctccgtgatgcatgaggctctgcacaaccactacacgcagaagagcctctccctgtctccgggtaaatga

SEQ ID NO: 634 - protein, 500 aa, Artificial Sequence
  source: /note="Description of Artificial Sequence: Synthetic polypeptide"
MEAPAQLLFLLLLWLPDTTGEVQLLESGGGLVQPGGSLRLSCAASGFTFSSYAMSWVRQTPGKGLEWVSAISGSGGSTYYANSVKGRFTISRDNSKNTLYLQMNSLRAEDTAVYYCARGGGYNPFDSWGQGTMVTVSSGGGGSGGGGSGGGGSAQSALTQPASVSGSPGQSITISCTGTGSDVGGYNYVSWYQQHPGKAPKLMIYEVINRPSGISNRFSGSKSGNTASLTISGLQAEDEADYYCGSYSSSSTLVFGGGTKLTVLGDVREPKSSDKTHTCPPCPAPELLGGPSVFLFPPKPKDTLMISRTPEVTCVVVDVSHEDPEVKFNWYVDGVEVHNAKTKPREEQYNSTYRVVSVLTVLHQDWLNGKEYKCKVSNKALPAPIEKTISKAKGQPREPQVYTLPPSRDELTKNQVSLTCLVKGFYPSDIAVEWESNGQPENNYKTTPPVLDSDGSFFLYSKLTVDKSRWQQGNVFSCSVMHEALHNHYTQKSLSLSPGK

SEQ ID NO: 635 - DNA, 1503 bp, Artificial Sequence
  source: /note="Description of Artificial Sequence: Synthetic polynucleotide"
atggaagcaccagcgcagcttctcttcctcctgctactctggctcccagataccaccggtgaggtgcagctgttggagtctgggggaggcttggtacagcctggggggtccctgagactctcctgtgcagcctctggattcacctttagcagctatgccatgagctgggtccgccaggctccagggaaggggctggagtgggtctcagctattagtggtagtggtggtagcacatactacgcagactccgtgaagggccggttcaccatctccagagacaattccaagaacacgctgtatctgcaaatgaacagcctgagagccgaggacacggccgtgtattactgtgcgagaggtcacaaaatgggatactttgactactggggccggggcaccctggtcaccgtctcgagtggaggcggcggttcaggcggaggtggctctggcggtggcggaagtgcactttcttctgagctgactcaggaccctgctgtgtccgtggccttgggacagtcagtcaccatcacgtgtcggggagccagcctcagcaactattatgcaagctggtaccagcagaggccaggacaagcccctctacttgtcgtctctgataacaacatccggccctcagggatcccagaccgattctctggctccaggtcaggaaccacagcttccttgagcatcactggggctcaggcggaagatgaggctgactattactgtcactcccgtgccagcagtgacacccatgtccgggtgtttggcggcgggaccaagctgaccgtcctaggtgacgtacgcgagcccaaatcttctgacaaaactcacacatgcccaccgtgcccagcacctgaactcctgggtggaccgtcagtcttcctcttccccccaaaacccaaggacaccctcatgatctcccggacccctgaggtcacatgcgtggtggtggacgtgagccacgaagaccctgaggtcaagttcaactggtacgtggacggcgtggaggtgcataatgccaagacaaagccgcgggaggagcagtacaacagcacgtaccgtgtggtcagcgtcctcaccgtcctgcaccaggactggctgaatggcaaggagtacaagtgcaaggtctccaacaaagccctcccagcccccatcgagaaaaccatctccaaagccaaagggcagccccgagaaccacaggtgtacaccctgcccccatcccgggatgagctgaccaagaaccaggtcagcctgacctgcctggtcaaaggcttctatccaagcgacatcgccgtggagtgggagagcaatgggcagccggagaacaactacaagaccacgcctcccgtgctggactccgacggctccttcttcctctacagcaagctcaccgtggacaagagcaggtggcagcaggggaacgtcttctcatgctccgtgatgcatgaggctctgcacaaccactacacgcagaagagcctctccctgtctccgggtaaatga

SEQ ID NO: 636 - protein, 500 aa, Artificial Sequence
  source: /note="Description of Artificial Sequence: Synthetic polypeptide"
MEAPAQLLFLLLLWLPDTTGEVQLLESGGGLVQPGGSLRLSCAASGFTFSSYAMSWVRQAPGKGLEWVSAISGSGGSTYYADSVKGRFTISRDNSKNTLYLQMNSLRAEDTAVYYCARGHKMGYFDYWGRGTLVTVSSGGGGSGGGGSGGGGSALSSELTQDPAVSVALGQSVTITCRGASLSNYYASWYQQRPGQAPLLVVSDNNIRPSGIPDRFSGSRSGTTASLSITGAQAEDEADYYCHSRASSDTHVRVFGGGTKLTVLGDVREPKSSDKTHTCPPCPAPELLGGPSVFLFPPKPKDTLMISRTPEVTCVVVDVSHEDPEVKFNWYVDGVEVHNAKTKPREEQYNSTYRVVSVLTVLHQDWLNGKEYKCKVSNKALPAPIEKTISKAKGQPREPQVYTLPPSRDELTKNQVSLTCLVKGFYPSDIAVEWESNGQPENNYKTTPPVLDSDGSFFLYSKLTVDKSRWQQGNVFSCSVMHEALHNHYTQKSLSLSPGK

SEQ ID NO: 637 - DNA, 1527 bp, Artificial Sequence
  source: /note="Description of Artificial Sequence: Synthetic polynucleotide"
atggaagcaccagcgcagcttctcttcctcctgctactctggctcccagataccaccggtgaggtgcagctgttggagtctgggggaggcttggtacagcctggggggtccctgagactctcctgtgcagcctctggattcacctttagcagctatgccatgagctgggtccgccaggctccagggaaggggctggagtgggtctcagctattagtggtagtggtggtagcacatactacgcagactccgtgaagggccggttcaccatctccagagacaattccaagaacacgctgtatctgcaaatgaacagcctgagagccgaggacacggccgtgtattactgtgcgagggacagggtctctaactggaactactacggccaggacagctactttgactactggggccaggggacaatggtcaccgtctcgagtggaggcggcggttcaggcggaggtggctctggcggtggcggaagtgcacagtctgtgctgactcagccaccctccgcgtctggggcccccgggcagagggtcaccatttcttgttctgggaccaactccaacatcggaagtaataatgtaaactggtatcagcaactcccaggaaaggcccccagactcctcatctacaataataatcagaggccctcaggggtccctgaccgattctctggctccaagtctggcacctcagcctccctggccatcagtgggctccagtctgagcttgaggctgattattattgttcagcatgggatgacagcctgcatggtccggtgttcggcggagggaccaagctgaccgtcctaggtgacgtacgcgagcccaaatcttctgacaaaactcacacatgcccaccgtgcccagcacctgaactcctgggtggaccgtcagtcttcctcttccccccaaaacccaaggacaccctcatgatctcccggacccctgaggtcacatgcgtggtggtggacgtgagccacgaagaccctgaggtcaagttcaactggtacgtggacggcgtggaggtgcataatgccaagacaaagccgcgggaggagcagtacaacagcacgtaccgtgtggtcagcgtcctcaccgtcctgcaccaggactggctgaatggcaaggagtacaagtgcaaggtctccaacaaagccctcccagcccccatcgagaaaaccatctccaaagccaaagggcagccccgagaaccacaggtgtacaccctgcccccatcccgggatgagctgaccaagaaccaggtcagcctgacctgcctggtcaaaggcttctatccaagcgacatcgccgtggagtgggagagcaatgggcagccggagaacaactacaagaccacgcctcccgtgctggactccgacggctccttcttcctctacagcaagctcaccgtggacaagagcaggtggcagcaggggaacgtcttctcatgctccgtgatgcatgaggctctgcacaaccactacacgcagaagagcctctccctgtctccgggtaaatga

SEQ ID NO: 638 - protein, 508 aa, Artificial Sequence
  source: /note="Description of Artificial Sequence: Synthetic polypeptide"
MEAPAQLLFLLLLWLPDTTGEVQLLESGGGLVQPGGSLRLSCAASGFTFSSYAMSWVRQAPGKGLEWVSAISGSGGSTYYADSVKGRFTISRDNSKNTLYLQMNSLRAEDTAVYYCARDRVSNWNYYGQDSYFDYWGQGTMVTVSSGGGGSGGGGSGGGGSAQSVLTQPPSASGAPGQRVTISCSGTNSNIGSNNVNWYQQLPGKAPRLLIYNNNQRPSGVPDRFSGSKSGTSASLAISGLQSELEADYYCSAWDDSLHGPVFGGGTKLTVLGDVREPKSSDKTHTCPPCPAPELLGGPSVFLFPPKPKDTLMISRTPEVTCVVVDVSHEDPEVKFNWYVDGVEVHNAKTKPREEQYNSTYRVVSVLTVLHQDWLNGKEYKCKVSNKALPAPIEKTISKAKGQPREPQVYTLPPSRDELTKNQVSLTCLVKGFYPSDIAVEWESNGQPENNYKTTPPVLDSDGSFFLYSKLTVDKSRWQQGNVFSCSVMHEALHNHYTQKSLSLSPGK

SEQ ID NO: 639 - DNA, 1530 bp, Artificial Sequence
  source: /note="Description of Artificial Sequence: Synthetic polynucleotide"
atggaagcaccagcgcagcttctcttcctcctgctactctggctcccagataccaccggtgaggtgcagctgttggagtctgggggaggcttggtacagcctggggggtccctgagactctcctgtgcagcctctggattcacctttagcagctatgccatgagctgggtccgccaggctccagggaaggggctggagtgggtctcagctattagtggtagtggtggtagcacatactacgcagactccgtgaagggccggttcaccatctccagagacaattccaagaacacgctgtatctgcaaatgaacagcctgagagccgaggacacggccgtgtattactgtgcgagggacagggtctctaactggaactactacggccaggacagctactttggctactggggccaggggacaatggtcaccgtctcgagtggaggcggcggttcaggcggaggtggctctggcggtggcggaagtgcactttcctatgagctgactcagccaccctcagcgtctgggacccccgggcagagggtcaccatctcttgttctggaagcagctccaacatcggaagtaatactgtaacctggtaccagcagctcccaggaacggccccccaactcctcttccataataatgaccagcggccctcaggggtccctgaccgattctctggctccaagtctggcacctcaggctccctggccatcagtgggctgcagtctgaggatgaggctgattattactgttcagcatgggatgacggcctgaatgctgtaatattcggcggagggaccaagctgaccgtcctaggtgacgtacgcgagcccaaatcttctgacaaaactcacacatgcccaccgtgcccagcacctgaactcctgggtggaccgtcagtcttcctcttccccccaaaacccaaggacaccctcatgatctcccggacccctgaggtcacatgcgtggtggtggacgtgagccacgaagaccctgaggtcaagttcaactggtacgtggacggcgtggaggtgcataatgccaagacaaagccgcgggaggagcagtacaacagcacgtaccgtgtggtcagcgtcctcaccgtcctgcaccaggactggctgaatggcaaggagtacaagtgcaaggtctccaacaaagccctcccagcccccatcgagaaaaccatctccaaagccaaagggcagccccgagaaccacaggtgtacaccctgcccccatcccgggatgagctgaccaagaaccaggtcagcctgacctgcctggtcaaaggcttctatccaagcgacatcgccgtggagtgggagagcaatgggcagccggagaacaactacaagaccacgcctcccgtgctggactccgacggctccttcttcctctacagcaagctcaccgtggacaagagcaggtggcagcaggggaacgtcttctcatgctccgtgatgcatgaggctctgcacaaccactacacgcagaagagcctctccctgtctccgggtaaatga

SEQ ID NO: 640 - protein, 509 aa, Artificial Sequence
  source: /note="Description of Artificial Sequence: Synthetic polypeptide"
MEAPAQLLFLLLLWLPDTTGEVQLLESGGGLVQPGGSLRLSCAASGFTFSSYAMSWVRQAPGKGLEWVSAISGSGGSTYYADSVKGRFTISRDNSKNTLYLQMNSLRAEDTAVYYCARDRVSNWNYYGQDSYFGYWGQGTMVTVSSGGGGSGGGGSGGGGSALSYELTQPPSASGTPGQRVTISCSGSSSNIGSNTVTWYQQLPGTAPQLLFHNNDQRPSGVPDRFSGSKSGTSGSLAISGLQSEDEADYYCSAWDDGLNAVIFGGGTKLTVLGDVREPKSSDKTHTCPPCPAPELLGGPSVFLFPPKPKDTLMISRTPEVTCVVVDVSHEDPEVKFNWYVDGVEVHNAKTKPREEQYNSTYRVVSVLTVLHQDWLNGKEYKCKVSNKALPAPIEKTISKAKGQPREPQVYTLPPSRDELTKNQVSLTCLVKGFYPSDIAVEWESNGQPENNYKTTPPVLDSDGSFFLYSKLTVDKSRWQQGNVFSCSVMHEALHNHYTQKSLSLSPGK

SEQ ID NO: 641 - DNA, 1518 bp, Artificial Sequence
  source: /note="Description of Artificial Sequence: Synthetic polynucleotide"
atggaagcaccagcgcagcttctcttcctcctgctactctggctcccagataccaccggtgaggtgcagctggtgcagtctggggcagaggtgaaaaagcccggggagtctctgaagatctcctgtaagggttctgggtacagctttagtaactactggatcggctgggtgcgccagatgcccgggaaaggcctggagtggatggggatcatctatcctggtgactctgataccagatacagcccgtccttccaaggccaggtcaccatctcagccgacaagtccatcagtaccgcctacctgcagtggagcagcctgaaggcctcggacagtgccatgtattactgtgcgagacatgattcgactatgggatatgatgcttttcatatgtggggccaaggaaccctggtcaccgtctcgagtggaggcggcggttcaggcggaggtggctctggcggtggcggaagtgcacaggctgtgctgactcagccgtcctcagtgtctggggccccagggcagagggtcaccatctcctgcactgggagcagctccaacatcggggcaggttatgatgtacactggtaccagcagcttccaggaacagcccccaaactcctcatctatggtaacagcaatcggccctcaggggtccctgaccgattctctggctccaagtctggcacctcagcctccctggccatcactgggctccaggctgaggatgaggctgattattactgccagtcctatgacagcagcctgagtggccctgtggtattcggcggagggaccaagctgaccgtcctaggtgacgtacgcgagcccaaatcttctgacaaaactcacacatgcccaccgtgcccagcacctgaactcctgggtggaccgtcagtcttcctcttccccccaaaacccaaggacaccctcatgatctcccggacccctgaggtcacatgcgtggtggtggacgtgagccacgaagaccctgaggtcaagttcaactggtacgtggacggcgtggaggtgcataatgccaagacaaagccgcgggaggagcagtacaacagcacgtaccgtgtggtcagcgtcctcaccgtcctgcaccaggactggctgaatggcaaggagtacaagtgcaaggtctccaacaaagccctcccagcccccatcgagaaaaccatctccaaagccaaagggcagccccgagaaccacaggtgtacaccctgcccccatcccgggatgagctgaccaagaaccaggtcagcctgacctgcctggtcaaaggcttctatccaagcgacatcgccgtggagtgggagagcaatgggcagccggagaacaactacaagaccacgcctcccgtgctggactccgacggctccttcttcctctacagcaagctcaccgtggacaagagcaggtggcagcaggggaacgtcttctcatgctccgtgatgcatgaggctctgcacaaccactacacgcagaagagcctctccctgtctccgggtaaatga

SEQ ID NO: 642 - protein, 505 aa, Artificial Sequence
  source: /note="Description of Artificial Sequence: Synthetic polypeptide"
MEAPAQLLFLLLLWLPDTTGEVQLVQSGAEVKKPGESLKISCKGSGYSFSNYWIGWVRQMPGKGLEWMGIIYPGDSDTRYSPSFQGQVTISADKSISTAYLQWSSLKASDSAMYYCARHDSTMGYDAFHMWGQGTLVTVSSGGGGSGGGGSGGGGSAQAVLTQPSSVSGAPGQRVTISCTGSSSNIGAGYDVHWYQQLPGTAPKLLIYGNSNRPSGVPDRFSGSKSGTSASLAITGLQAEDEADYYCQSYDSSLSGPVVFGGGTKLTVLGDVREPKSSDKTHTCPPCPAPELLGGPSVFLFPPKPKDTLMISRTPEVTCVVVDVSHEDPEVKFNWYVDGVEVHNAKTKPREEQYNSTYRVVSVLTVLHQDWLNGKEYKCKVSNKALPAPIEKTISKAKGQPREPQVYTLPPSRDELTKNQVSLTCLVKGFYPSDIAVEWESNGQPENNYKTTPPVLDSDGSFFLYSKLTVDKSRWQQGNVFSCSVMHEALHNHYTQKSLSLSPGK

SEQ ID NO: 643 - DNA, 1518 bp, Artificial Sequence
  source: /note="Description of Artificial Sequence: Synthetic polynucleotide"
atggaagcaccagcgcagcttctcttcctcctgctactctggctcccagataccaccggtgaggtgcagctgttggagtctgggggaggcttggtacagcctggggggtccctgagactctcctgtgcagcctctggattcacctttagcagctatgccatgagctgggtccgccaggctccagggaaggggctggagtgggtctcagctattagtggtagtggtggtagcacatactacgcagactccgtgaagggccggttcaccatctccagagataattccaagaacacgctgtatctgcaaatgaacagcctgagagccgaggacacggccgtgtattactgtgcgagagtgggggccggggagaactactaccactactacatcatggacgtctggggccggggcaccctggtcaccgtctcgagtggaggcggcggttcaggcggaggtggctctggcggtggcggaagtgcactttcttctgagctgactcaggaccctgctgtgtctgtggccttgggacagagagtcagggtcacatgccaaggagacagcctcagaggctattatgcaagctggtaccagcagaagccaggacaggcccctgttcttgtcatctatggtgaaaacaaccggccctcagggatcccagaccgattctctggctccagctcaggaaacacagcttccttgaccatcactggggctcaggcggaagatgaggctgactattactgtaactcccggcacagcagtggtaattatctggtgttcggcggagggaccaagctgaccgtcctaggtgacgtacgcgagcccaaatcttctgacaaaactcacacatgcccaccgtgcccagcacctgaactcctgggtggaccgtcagtcttcctcttccccccaaaacccaaggacaccctcatgatctcccggacccctgaggtcacatgcgtggtggtggacgtgagccacgaagaccctgaggtcaagttcaactggtacgtggacggcgtggaggtgcataatgccaagacaaagccgcgggaggagcagtacaacagcacgtaccgtgtggtcagcgtcctcaccgtcctgcaccaggactggctgaatggcaaggagtacaagtgcaaggtctccaacaaagccctcccagcccccatcgagaaaaccatctccaaagccaaagggcagccccgagaaccacaggtgtacaccctgcccccatcccgggatgagctgaccaagaaccaggtcagcctgacctgcctggtcaaaggcttctatccaagcgacatcgccgtggagtgggagagcaatgggcagccggagaacaactacaagaccacgcctcccgtgctggactccgacggctccttcttcctctacagcaagctcaccgtggacaagagcaggtggcagcaggggaacgtcttctcatgctccgtgatgcatgaggctctgcacaaccactacacgcagaagagcctctccctgtctccgggtaaatga

SEQ ID NO: 644 - protein, 505 aa, Artificial Sequence
  source: /note="Description of Artificial Sequence: Synthetic polypeptide"
MEAPAQLLFLLLLWLPDTTGEVQLLESGGGLVQPGGSLRLSCAASGFTFSSYAMSWVRQAPGKGLEWVSAISGSGGSTYYADSVKGRFTISRDNSKNTLYLQMNSLRAEDTAVYYCARVGAGENYYHYYIMDVWGRGTLVTVSSGGGGSGGGGSGGGGSALSSELTQDPAVSVALGQRVRVTCQGDSLRGYYASWYQQKPGQAPVLVIYGENNRPSGIPDRFSGSSSGNTASLTITGAQAEDEADYYCNSRHSSGNYLVFGGGTKLTVLGDVREPKSSDKTHTCPPCPAPELLGGPSVFLFPPKPKDTLMISRTPEVTCVVVDVSHEDPEVKFNWYVDGVEVHNAKTKPREEQYNSTYRVVSVLTVLHQDWLNGKEYKCKVSNKALPAPIEKTISKAKGQPREPQVYTLPPSRDELTKNQVSLTCLVKGFYPSDIAVEWESNGQPENNYKTTPPVLDSDGSFFLYSKLTVDKSRWQQGNVFSCSVMHEALHNHYTQKSLSLSPGK

SEQ ID NO: 645 - DNA, 1497 bp, Artificial Sequence
  source: /note="Description of Artificial Sequence: Synthetic polynucleotide"
atggaagcaccagcgcagcttctcttcctcctgctactctggctcccagataccaccggtgaggtgcagctgttggagtctgggggaggcttggtacagcctggggggtccctgagactctcctgtgcagcctctggattcacctttagcagctatgccatgagctgggtccgccaggctccagggaaggggctggagtgggtctcagctattagtggtagtggtggtagcacatactacgcagactccgtgaagggccggttcaccatctccagagacaattccaagaacacgctgtatctgcaaatgaacagcctgagagccgaggacacggccgtgtattactgtgcgagaactacggcagatgcttttgatatctggggcagagggacaatggtcaccgtctcgagtggaggcggcggttcaggcggaggtggctctggcggtggcggaagtgcactttcttctgagctgactcaggaccctgctgtgtctgtggccttgggacagacagtcaagatcacatgccaaggcgacagcctcagaaactattatgcaggctggtaccagcagaagccaggacaggcccctgtacttgtcatctatggtgaaaacaagcggccctcagggatccctgaccgattctctggctccaactcaggaaacacagcttccttgaccctcactggggctcaggcggaagatgaggctgactattactgtaactcccgggacagcagtagtaacctcgtggtattcggcggagggaccaagctgaccgtcctaggtgacgtacgcgagcccaaatcttctgacaaaactcacacatgcccaccgtgcccagcacctgaactcctgggtggaccgtcagtcttcctcttccccccaaaacccaaggacaccctcatgatctcccggacccctgaggtcacatgcgtggtggtggacgtgagccacgaagaccctgaggtcaagttcaactggtacgtggacggcgtggaggtgcataatgccaagacaaagccgcgggaggagcagtacaacagcacgtaccgtgtggtcagcgtcctcaccgtcctgcaccaggactggctgaatggcaaggagtacaagtgcaaggtctccaacaaagccctcccagcccccatcgagaaaaccatctccaaagccaaagggcagccccgagaaccacaggtgtacaccctgcccccatcccgggatgagctgaccaagaaccaggtcagcctgacctgcctggtcaaaggcttctatccaagcgacatcgccgtggagtgggagagcaatgggcagccggagaacaactacaagaccacgcctcccgtgctggactccgacggctccttcttcctctacagcaagctcaccgtggacaagagcaggtggcagcaggggaacgtcttctcatgctccgtgatgcatgaggctctgcacaaccactacacgcagaagagcctctccctgtctccgggtaaatga

SEQ ID NO: 646 - protein, 498 aa, Artificial Sequence
  source: /note="Description of Artificial Sequence: Synthetic polypeptide"
MEAPAQLLFLLLLWLPDTTGEVQLLESGGGLVQPGGSLRLSCAASGFTFSSYAMSWVRQAPGKGLEWVSAISGSGGSTYYADSVKGRFTISRDNSKNTLYLQMNSLRAEDTAVYYCARTTADAFDIWGRGTMVTVSSGGGGSGGGGSGGGGSALSSELTQDPAVSVALGQTVKITCQGDSLRNYYAGWYQQKPGQAPVLVIYGENKRPSGIPDRFSGSNSGNTASLTLTGAQAEDEADYYCNSRDSSSNLVVFGGGTKLTVLGDVREPKSSDKTHTCPPCPAPELLGGPSVFLFPPKPKDTLMISRTPEVTCVVVDVSHEDPEVKFNWYVDGVEVHNAKTKPREEQYNSTYRVVSVLTVLHQDWLNGKEYKCKVSNKALPAPIEKTISKAKGQPREPQVYTLPPSRDELTKNQVSLTCLVKGFYPSDIAVEWESNGQPENNYKTTPPVLDSDGSFFLYSKLTVDKSRWQQGNVFSCSVMHEALHNHYTQKSLSLSPGK

SEQ ID NO: 647 - DNA, 1509 bp, Artificial Sequence
  source: /note="Description of Artificial Sequence: Synthetic polynucleotide"
atggaagcaccagcgcagcttctcttcctcctgctactctggctcccagataccaccggtgaggtgcagctgttggagtctgggggaggcttggtacagcctggggggtccctgagactctcctgtgcagcctctggattcacctttagcagctataccatgagctgggtccgccaggctccagggaaggggctggagtgggtctcagctattagtggtagtggtggtagcacatactacgcagactccgtgaagggccggttcaccatctccagagacaattccaagaacacgctgtatctgcaaatgaacagcctgagagccgaggacacggccgtgtattactgtgcaaggaatagcagcaattggagtggtgcttttgatatctgggggcgggggaccacggtcaccgtctcgagtggaggcggcggttcaggcggaggtggctctggcggtggcggaagtgcacagtctgtgctgacgcagccgccctcagtgtctggggccccagggcagagggtcaccatctcctgcattggaacccactcaaacatcggggcaggttacgctgtgaactggtaccagcagcttccaggaacagcccccaaactcctcatctatggtaataacaatcggccctcaggggtccctgaccgattctctggctccaagtctggcacctcagcctccctggccatcaatgggctccaggctgacgatgagtctgattattattgccagtcctatgacgccagtctgagagttttattcggcggagggaccaagctgaccgtcctaggtgacgtacgcgagcccaaatcttctgacaaaactcacacatgcccaccgtgcccagcacctgaactcctgggtggaccgtcagtcttcctcttccccccaaaacccaaggacaccctcatgatctcccggacccctgaggtcacatgcgtggtggtggacgtgagccacgaagaccctgaggtcaagttcaactggtacgtggacggcgtggaggtgcataatgccaagacaaagccgcgggaggagcagtacaacagcacgtaccgtgtggtcagcgtcctcaccgtcctgcaccaggactggctgaatggcaaggagtacaagtgcaaggtctccaacaaagccctcccagcccccatcgagaaaaccatctccaaagccaaagggcagccccgagaaccacaggtgtacaccctgcccccatcccgggatgagctgaccaagaaccaggtcagcctgacctgcctggtcaaaggcttctatccaagcgacatcgccgtggagtgggagagcaatgggcagccggagaacaactacaagaccacgcctcccgtgctggactccgacggctccttcttcctctacagcaagctcaccgtggacaagagcaggtggcagcaggggaacgtcttctcatgctccgtgatgcatgaggctctgcacaaccactacacgcagaagagcctctccctgtctccgggtaaatga

SEQ ID NO: 648 - protein, 502 aa, Artificial Sequence
  source: /note="Description of Artificial Sequence: Synthetic polypeptide"
MEAPAQLLFLLLLWLPDTTGEVQLLESGGGLVQPGGSLRLSCAASGFTFSSYTMSWVRQAPGKGLEWVSAISGSGGSTYYADSVKGRFTISRDNSKNTLYLQMNSLRAEDTAVYYCARNSSNWSGAFDIWGRGTTVTVSSGGGGSGGGGSGGGGSAQSVLTQPPSVSGAPGQRVTISCIGTHSNIGAGYAVNWYQQLPGTAPKLLIYGNNNRPSGVPDRFSGSKSGTSASLAINGLQADDESDYYCQSYDASLRVLFGGGTKLTVLGDVREPKSSDKTHTCPPCPAPELLGGPSVFLFPPKPKDTLMISRTPEVTCVVVDVSHEDPEVKFNWYVDGVEVHNAKTKPREEQYNSTYRVVSVLTVLHQDWLNGKEYKCKVSNKALPAPIEKTISKAKGQPREPQVYTLPPSRDELTKNQVSLTCLVKGFYPSDIAVEWESNGQPENNYKTTPPVLDSDGSFFLYSKLTVDKSRWQQGNVFSCSVMHEALHNHYTQKSLSLSPGK

SEQ ID NO: 649 - DNA, 1536 bp, Artificial Sequence
  source: /note="Description of Artificial Sequence: Synthetic polynucleotide"
atggaagcaccagcgcagcttctcttcctcctgctactctggctcccagataccaccggtgaggtgcagctgttggagtctgggggaggcttggtacagcctggggggtccctgagactctcctgtgcagcctctggattcacctttagcagctatgccatgagctgggtccgccaggctccagggaaggggctggagtgggtctcagctattagtggtagtggtggtagcacatactacgcagactccgtgaagggccggttcaccatctccagagacaattccaagaacacgctgtatctgcaaatgaacagcctgagagccgaggacacggccgtgtattactgtgcgagagatgacgatttttggagtggttatccattcctctactactactacggtatggacgtctggggccgagggacaatggtcaccgtctcgagtggaggcggcggttcaggcggaggtggctctggcggtggcggaagtgcacagtctgtcgtgacgcagccgccctcagcgtctgggacccccgggcagagggtcaccatctcttgttctggaactagttccaacatcggaagtaatgctgtaaactggtaccagcaactcccaggaacggcccccaaactcctcatctataataataatcagcggccctcaggggtccctgaccgattctctggctccaagtctggcacctcagcctccctggccatcagtggactccagtctgaggatgaggctgattattactgtgcagcatgggatgacagcctgaatgtttatgtggtattcggcggagggaccaagctgaccgtcctaggtgacgtacgcgagcccaaatcttctgacaaaactcacacatgcccaccgtgcccagcacctgaactcctgggtggaccgtcagtcttcctcttccccccaaaacccaaggacaccctcatgatctcccggacccctgaggtcacatgcgtggtggtggacgtgagccacgaagaccctgaggtcaagttcaactggtacgtggacggcgtggaggtgcataatgccaagacaaagccgcgggaggagcagtacaacagcacgtaccgtgtggtcagcgtcctcaccgtcctgcaccaggactggctgaatggcaaggagtacaagtgcaaggtctccaacaaagccctcccagcccccatcgagaaaaccatctccaaagccaaagggcagccccgagaaccacaggtgtacaccctgcccccatcccgggatgagctgaccaagaaccaggtcagcctgacctgcctggtcaaaggcttctatccaagcgacatcgccgtggagtgggagagcaatgggcagccggagaacaactacaagaccacgcctcccgtgctggactccgacggctccttcttcctctacagcaagctcaccgtggacaagagcaggtggcagcaggggaacgtcttctcatgctccgtgatgcatgaggctctgcacaaccactacacgcagaagagcctctccctgtctccgggtaaatga

SEQ ID NO: 650 - protein, 511 aa, Artificial Sequence
  source: /note="Description of Artificial Sequence: Synthetic polypeptide"
MEAPAQLLFLLLLWLPDTTGEVQLLESGGGLVQPGGSLRLSCAASGFTFSSYAMSWVRQAPGKGLEWVSAISGSGGSTYYADSVKGRFTISRDNSKNTLYLQMNSLRAEDTAVYYCARDDDFWSGYPFLYYYYGMDVWGRGTMVTVSSGGGGSGGGGSGGGGSAQSVVTQPPSASGTPGQRVTISCSGTSSNIGSNAVNWYQQLPGTAPKLLIYNNNQRPSGVPDRFSGSKSGTSASLAISGLQSEDEADYYCAAWDDSLNVYVVFGGGTKLTVLGDVREPKSSDKTHTCPPCPAPELLGGPSVFLFPPKPKDTLMISRTPEVTCVVVDVSHEDPEVKFNWYVDGVEVHNAKTKPREEQYNSTYRVVSVLTVLHQDWLNGKEYKCKVSNKALPAPIEKTISKAKGQPREPQVYTLPPSRDELTKNQVSLTCLVKGFYPSDIAVEWESNGQPENNYKTTPPVLDSDGSFFLYSKLTVDKSRWQQGNVFSCSVMHEALHNHYTQKSLSLSPGK

SEQ ID NO: 651 - DNA, 1527 bp, Artificial Sequence
  source: /note="Description of Artificial Sequence: Synthetic polynucleotide"
atggaagcaccagcgcagcttctcttcctcctgctactctggctcccagataccaccggtgaggtgcagctgttggagtctgggggaggcttggtacagcctggggggtccctgagactctcctgtgcagcctctggattcacctttagcagctatgccatgagctgggtccgccaggctccagggaaggggctggagtgggtctcagctattagtggtagtggtggtagcacttactacgcagactccgtgaagggccggttcaccatctccagagacaattccaagaacacgctgtatctgcaaatgaacagcctgagagccgaggacacggccgtgtattactgtgctaaatggggctgggattactatgacacaactggtcatgatgcctttgatttctggggccgggggacaatggtcaccgtctcgagtggaggcggcggttcaggcggaggtggctctggcggtggcggaagtgcacaggctgtgctgactcagccgtcctcagtgtctggggccccagggcagagggtcaccatctcctgcactgggagcagctccaacatcggggcagattattatgtaaattggtatcagcaacttccaggaaaagcccccgaaatcgtaatttttaatgatgacaatcggccctcaggggtccctaaccgattctctggctccaagtctggcacctcagcctccctggccatcactgggctccaggctgaagatgaggctgattattattgccagtcttatgacagtgtcctgagtgcttatgtcttcggaactgggaccaaggtcaccgtcctaggtgacgtacgcgagcccaaatcttctgacaaaactcacacatgcccaccgtgcccagcacctgaactcctgggtggaccgtcagtcttcctcttccccccaaaacccaaggacaccctcatgatctcccggacccctgaggtcacatgcgtggtggtggacgtgagccacgaagaccctgaggtcaagttcaactggtacgtggacggcgtggaggtgcataatgccaagacaaagccgcgggaggagcagtacaacagcacgtaccgtgtggtcagcgtcctcaccgtcctgcaccaggactggctgaatggcaaggagtacaagtgcaaggtctccaacaaagccctcccagcccccatcgagaaaaccatctccaaagccaaagggcagccccgagaaccacaggtgtacaccctgcccccatcccgggatgagctgaccaagaaccaggtcagcctgacctgcctggtcaaaggcttctatccaagcgacatcgccgtggagtgggagagcaatgggcagccggagaacaactacaagaccacgcctcccgtgctggactccgacggctccttcttcctctacagcaagctcaccgtggacaagagcaggtggcagcaggggaacgtcttctcatgctccgtgatgcatgaggctctgcacaaccactacacgcagaagagcctctccctgtctccgggtaaatga

SEQ ID NO: 652 - protein, 508 aa, Artificial Sequence
  source: /note="Description of Artificial Sequence: Synthetic polypeptide"
MEAPAQLLFLLLLWLPDTTGEVQLLESGGGLVQPGGSLRLSCAASGFTFSSYAMSWVRQAPGKGLEWVSAISGSGGSTYYADSVKGRFTISRDNSKNTLYLQMNSLRAEDTAVYYCAKWGWDYYDTTGHDAFDFWGRGTMVTVSSGGGGSGGGGSGGGGSAQAVLTQPSSVSGAPGQRVTISCTGSSSNIGADYYVNWYQQLPGKAPEIVIFNDDNRPSGVPNRFSGSKSGTSASLAITGLQAEDEADYYCQSYDSVLSAYVFGTGTKVTVLGDVREPKSSDKTHTCPPCPAPELLGGPSVFLFPPKPKDTLMISRTPEVTCVVVDVSHEDPEVKFNWYVDGVEVHNAKTKPREEQYNSTYRVVSVLTVLHQDWLNGKEYKCKVSNKALPAPIEKTISKAKGQPREPQVYTLPPSRDELTKNQVSLTCLVKGFYPSDIAVEWESNGQPENNYKTTPPVLDSDGSFFLYSKLTVDKSRWQQGNVFSCSVMHEALHNHYTQKSLSLSPGK

SEQ ID NO: 653 - DNA, 1500 bp, Artificial Sequence
  source: /note="Description of Artificial Sequence: Synthetic polynucleotide"
atggaagcaccagcgcagcttctcttcctcctgctactctggctcccagataccaccggtgaggtgcagctggtggagactggggctgaggtgaagaagcctggggcctcaatgaaggtctcctgcaaggcttctggatacagcttcaccgactactatatgcactgggtgcgacaggcccctggacaagggcttgagtggatgggatggatcaaccctaatagtggtgacacaaactatgcacagaagtttcagggcagggtcaccatgaccagggacacgtccatcaccacagcctacatggagctgagcaggctgagatctgacgacacggccgtatattactgtgcgacagagaggtataacagtggctgggaatggggccggggcaccctggtcaccgtctcgagtggaggcggcggttcaggcggaggtggctctggcggtggcggaagtgcacagtctgccctgactcagcctgcctccgtgtctgggtctcctggacagtcgatcaccgtctcctgcactggaaccagcagtgacgttggtgcttataactatgtctcctggtaccaacaacacccaggcaaagcccccaaactcatgatttatgatgtcactactcggccctcaggggtttctaatcgcttctctggctccaagtctggcaacacggcctccctgaccatctctgggctccaggctgaggacgaggctgattattactgcacctcatatactcgcagcagcactgtggtcttcggcggagggaccaagctgaccgtcctaggtgacgtacgcgagcccaaatcttctgacaaaactcacacatgcccaccgtgcccagcacctgaactcctgggtggaccgtcagtcttcctcttccccccaaaacccaaggacaccctcatgatctcccggacccctgaggtcacatgcgtggtggtggacgtgagccacgaagaccctgaggtcaagttcaactggtacgtggacggcgtggaggtgcataatgccaagacaaagccgcgggaggagcagtacaacagcacgtaccgtgtggtcagcgtcctcaccgtcctgcaccaggactggctgaatggcaaggagtacaagtgcaaggtctccaacaaagccctcccagcccccatcgagaaaaccatctccaaagccaaagggcagccccgagaaccacaggtgtacaccctgcccccatcccgggatgagctgaccaagaaccaggtcagcctgacctgcctggtcaaaggcttctatccaagcgacatcgccgtggagtgggagagcaatgggcagccggagaacaactacaagaccacgcctcccgtgctggactccgacggctccttcttcctctacagcaagctcaccgtggacaagagcaggtggcagcaggggaacgtcttctcatgctccgtgatgcatgaggctctgcacaaccactacacgcagaagagcctctccctgtctccgggtaaatga

SEQ ID NO: 654 - protein, 499 aa, Artificial Sequence
  source: /note="Description of Artificial Sequence: Synthetic polypeptide"
MEAPAQLLFLLLLWLPDTTGEVQLVETGAEVKKPGASMKVSCKASGYSFTDYYMHWVRQAPGQGLEWMGWINPNSGDTNYAQKFQGRVTMTRDTSITTAYMELSRLRSDDTAVYYCATERYNSGWEWGRGTLVTVSSGGGGSGGGGSGGGGSAQSALTQPASVSGSPGQSITVSCTGTSSDVGAYNYVSWYQQHPGKAPKLMIYDVTTRPSGVSNRFSGSKSGNTASLTISGLQAEDEADYYCTSYTRSSTVVFGGGTKLTVLGDVREPKSSDKTHTCPPCPAPELLGGPSVFLFPPKPKDTLMISRTPEVTCVVVDVSHEDPEVKFNWYVDGVEVHNAKTKPREEQYNSTYRVVSVLTVLHQDWLNGKEYKCKVSNKALPAPIEKTISKAKGQPREPQVYTLPPSRDELTKNQVSLTCLVKGFYPSDIAVEWESNGQPENNYKTTPPVLDSDGSFFLYSKLTVDKSRWQQGNVFSCSVMHEALHNHYTQKSLSLSPGK

SEQ ID NO: 655 - DNA, 1515 bp, Artificial Sequence
  source: /note="Description of Artificial Sequence: Synthetic polynucleotide"
atggaagcaccagcgcagcttctcttcctcctgctactctggctcccagataccaccggtgaggtgcagctgttggagtctgggggaggcttggtacagcctggggggtccctgagactctcctgtgcagcctctggattcacctttagcagctatgccatgagctgggtccgccaggctccagggaaggggctggagtgggtctcagctattagtggtagtggtggtagcacatactacgcagactccgtgaagggccggttcaccatctccagagacaattccaagaacacgctgtatctgcaaatgaacagcctgagagccgaggacacggccgtgtattactgtgcggtccatggctacggagactccgtggatgatgctcttgatgtctggggccgaggaaccctggtcaccgtctcgagtggaggcggcggttcaggcggaggtggctctggcggtggcggaagtgcacagtctgtgctgacgcagccgccctcagcgtctgggacccccgggcagacgatctccatctcttgttctggaagcaactccaacatcggaacttatagtgttagctggtaccagcagctcccacgagcggcccccagactcctcgtctatgctaatgatcgccggccctcaggggtccctgaccgattctctggctccaagtctggcacctcagcctccctggccatcagtgggctccagtctgaggatgaggctgattattactgtgcagtatgggatgacaggttgaatggttttgtcttcggaactgggaccaagctgaccgtcctaggtgacgtacgcgagcccaaatcttctgacaaaactcacacatgcccaccgtgcccagcacctgaactcctgggtggaccgtcagtcttcctcttccccccaaaacccaaggacaccctcatgatctcccggacccctgaggtcacatgcgtggtggtggacgtgagccacgaagaccctgaggtcaagttcaactggtacgtggacggcgtggaggtgcataatgccaagacaaagccgcgggaggagcagtacaacagcacgtaccgtgtggtcagcgtcctcaccgtcctgcaccaggactggctgaatggcaaggagtacaagtgcaaggtctccaacaaagccctcccagcccccatcgagaaaaccatctccaaagccaaagggcagccccgagaaccacaggtgtacaccctgcccccatcccgggatgagctgaccaagaaccaggtcagcctgacctgcctggtcaaaggcttctatccaagcgacatcgccgtggagtgggagagcaatgggcagccggagaacaactacaagaccacgcctcccgtgctggactccgacggctccttcttcctctacagcaagctcaccgtggacaagagcaggtggcagcaggggaacgtcttctcatgctccgtgatgcatgaggctctgcacaaccactacacgcagaagagcctctccctgtctccgggtaaatga

SEQ ID NO: 656 - protein, 504 aa, Artificial Sequence
  source: /note="Description of Artificial Sequence: Synthetic polypeptide"
MEAPAQLLFLLLLWLPDTTGEVQLLESGGGLVQPGGSLRLSCAASGFTFSSYAMSWVRQAPGKGLEWVSAISGSGGSTYYADSVKGRFTISRDNSKNTLYLQMNSLRAEDTAVYYCAVHGYGDSVDDALDVWGRGTLVTVSSGGGGSGGGGSGGGGSAQSVLTQPPSASGTPGQTISISCSGSNSNIGTYSVSWYQQLPRAAPRLLVYANDRRPSGVPDRFSGSKSGTSASLAISGLQSEDEADYYCAVWDDRLNGFVFGTGTKLTVLGDVREPKSSDKTHTCPPCPAPELLGGPSVFLFPPKPKDTLMISRTPEVTCVVVDVSHEDPEVKFNWYVDGVEVHNAKTKPREEQYNSTYRVVSVLTVLHQDWLNGKEYKCKVSNKALPAPIEKTISKAKGQPREPQVYTLPPSRDELTKNQVSLTCLVKGFYPSDIAVEWESNGQPENNYKTTPPVLDSDGSFFLYSKLTVDKSRWQQGNVFSCSVMHEALHNHYTQKSLSLSPGK

SEQ ID NO: 657 - DNA, 1509 bp, Artificial Sequence
  source: /note="Description of Artificial Sequence: Synthetic polynucleotide"
atggaagcaccagcgcagcttctcttcctcctgctactctggctcccagataccaccggtgaggtgcagctgttggagtctgggggaggcttggtacagcctggggggtccctgagactctcctgtgcagcctctggattcacctttagcagctatgccatgagctgggtccgccaggctccagggaaggggctggagtgggtctcagctattagtggtagtggtggtagcacatactacgcagactccgtgaagggccggttcaccatctccagagacaattccaagaacacgctgtatctgcaaatgaacagcctgagagccgaggacacggccgtgtattactgtgcgaagtatggtggctacgacgctgatgcctttgatgtctggggccgagggacaatggtcaccgtctcgagtggaggcggcggttcaggcggaggtggctctggcggtggcggaagtgcacagtctgtcgtgacgcagccgccctcagtgtctgcggccccaggacagaaggtcaccatctcctgctctggaagtagctccaacattggagattattatgtatcctggtaccagcaactcccaggaacggcccccacactcctcatttatgacaatgataagcgaccctcagaagttcctgaccgattctctggctccaagtctggcacgtcggccaccctcggcatcaccggactccagactggggacgaggccgattattactgcacttcatgggatagcagcctgagtgctggggtgttcggcggagggaccaaggtcaccgtcctaggtgacgtacgcgagcccaaatcttctgacaaaactcacacatgcccaccgtgcccagcacctgaactcctgggtggaccgtcagtcttcctcttccccccaaaacccaaggacaccctcatgatctcccggacccctgaggtcacatgcgtggtggtggacgtgagccacgaagaccctgaggtcaagttcaactggtacgtggacggcgtggaggtgcataatgccaagacaaagccgcgggaggagcagtacaacagcacgtaccgtgtggtcagcgtcctcaccgtcctgcaccaggactggctgaatggcaaggagtacaagtgcaaggtctccaacaaagccctcccagcccccatcgagaaaaccatctccaaagccaaagggcagccccgagaaccacaggtgtacaccctgcccccatcccgggatgagctgaccaagaaccaggtcagcctgacctgcctggtcaaaggcttctatccaagcgacatcgccgtggagtgggagagcaatgggcagccggagaacaactacaagaccacgcctcccgtgctggactccgacggctccttcttcctctacagcaagctcaccgtggacaagagcaggtggcagcaggggaacgtcttctcatgctccgtgatgcatgaggctctgcacaaccactacacgcagaagagcctctccctgtctccgggtaaatga

SEQ ID NO: 658 - protein, 502 aa, Artificial Sequence [sequence omitted]

SEQ ID NO: 659 - DNA, 1524 bp, Artificial Sequence
  source: /note="Description of Artificial Sequence: Synthetic polynucleotide"
atggaagcaccagcgcagcttctcttcctcctgctactctggctcccagataccaccggtaaggtgcagctggtgcagtctgggtctgagttgaagaagcctggggcctcagtgaaggtttcctgccaggcttctggatacaccatcactaaccatagcatgaattgggtgcgacaggcccctgggcaagggcttgagtggatgggatggatcaacaccaacactgggaaccctacgtatgcccagggcttcacaggacggtttgtcttctccttggacacctctgccaacacggcaactttgcagatcaccaacgtgcaggctgaggacacagccgtctactactgtgcgagagaggggagtatagacgtgtctggaacgccctactactacggaatggacgcctgggggcaagggaccacggtcaccgtctcctcaggtggaggcggttcaggcggaggtggcagcggcggtggcggatcgcagtctgtgctgactcagcctgcctccgtgtctgggtctcctggacagtcgatcaccatctcctgcactggaaccagcagtgacgttggtggttataactatgtctcctggtaccaacaacacccaggcaaagcccccaaactcatgatttatgagggcagtgagcggccctcaggggttcctaatcgcttctctggctccaagtctggcaacacggcctccctgacaatctctgggctccaggctgaggacgaggctgattattactgcagctcatatacaaccaggagcactcgagttttcggcggagggaccaagctgaccatcctaggtgacgtacgcgagcccaaatcttctgacaaaactcacacatgcccaccgtgcccagcacctgaactcctgggtggaccgtcagtcttcctcttccccccaaaacccaaggacaccctcatgatctcccggacccctgaggtcacatgcgtggtggtggacgtgagccacgaagaccctgaggtcaagttcaactggtacgtggacggcgtggaggtgcataatgccaagacaaagccgcgggaggagcagtacaacagcacgtaccgtgtggtcagcgtcctcaccgtcctgcaccaggactggctgaatggcaaggagtacaagtgcaaggtctccaacaaagccctcccagcccccatcgagaaaaccatctccaaagccaaagggcagccccgagaaccacaggtgtacaccctgcccccatcccgggatgagctgaccaagaaccaggtcagcctgacctgcctggtcaaaggcttctatccaagcgacatcgccgtggagtgggagagcaatgggcagccggagaacaactacaagaccacgcctcccgtgctggactccgacggctccttcttcctctacagcaagctcaccgtggacaagagcaggtggcagcaggggaacgtcttctcatgctccgtgatgcatgaggctctgcacaaccactacacgcagaagagcctctccctgtctccgggtaaatga

SEQ ID NO: 660 - protein, 507 aa, Artificial Sequence [sequence omitted]

SEQ ID NO: 661 - DNA, 1512 bp, Artificial Sequence
  source: /note="Description of Artificial Sequence: Synthetic polynucleotide"
atggaagcaccagcgcagcttctcttcctcctgctactctggctcccagataccaccggtcaggtgcagctggtgcagtctggggcagaaataaaaaagccgggggagtctctgaagatctcctgtgagggttctggatacaggtttaccagccactggatcggctgggtgcgccagatgcccgggaaaggcctggagtggatggggatcatctatcctggtgactctgataccagatacagcccgtccttccaaggccaggtcaccatctcagccgacaagtccatcagcaccgcctacctgcagtggagcagcctgaaggcctcggacaccgccatgtattactgtgcgagacatagtgcgacgcatgatgcttttgatatctggggccggggcaccctggtcaccgtctcgagtggaggcggcggttcaggcggaggtggctctggcggtggcggaagtgcacagtctgtgttgacgcagccgccctcagtgtctggggccccagggcagagggtcaccatctcctgtagtgggagcagctccaacatcgggacaggttacgatgttcactggtaccagcaacttccaggaacagcccccaaactcctcatctatagtttcaataagcggccctcaggggtccctgaccggttctctgcctccaagtctggcacctcagcctccctggtcatcactgggctccaggctgaggatgaggctgattattactgccagtcctatgacaatttgagtggtccccatgtggttttcggcacagggaccaagctgaccgtcctaggtgacgtacgcgagcccaaatcttctgacaaaactcacacatgcccaccgtgcccagcacctgaactcctgggtggaccgtcagtcttcctcttccccccaaaacccaaggacaccctcatgatctcccggacccctgaggtcacatgcgtggtggtggacgtgagccacgaagaccctgaggtcaagttcaactggtacgtggacggcgtggaggtgcataatgccaagacaaagccgcgggaggagcagtacaacagcacgtaccgtgtggtcagcgtcctcaccgtcctgcaccaggactggctgaatggcaaggagtacaagtgcaaggtctccaacaaagccctcccagcccccatcgagaaaaccatctccaaagccaaagggcagccccgagaaccacaggtgtacaccctgcccccatcccgggatgagctgaccaagaaccaggtcagcctgacctgcctggtcaaaggcttctatccaagcgacatcgccgtggagtgggagagcaatgggcagccggagaacaactacaagaccacgcctcccgtgctggactccgacggctccttcttcctctacagcaagctcaccgtggacaagagcaggtggcagcaggggaacgtcttctcatgctccgtgatgcatgaggctctgcacaaccactacacgcagaagagcctctccctgtctccgggtaaatga

SEQ ID NO: 662 - protein, 503 aa, Artificial Sequence [sequence omitted]

SEQ ID NO: 663 - DNA, 1533 bp, Artificial Sequence
  source: /note="Description of Artificial Sequence: Synthetic polynucleotide"
atggaagcaccagcgcagcttctcttcctcctgctactctggctcccagataccaccggtcaggtgcagctgcaggagtcgggcccaggactggtgaagccttcggagaccctgtccctcacctgcactgtctctggtggctccatcaccagtgatctttcctactggggctggctccgccagccccccgggaagggtctggagtggattgcgagtggtggtgacggtgagagcacctactacaacccgtccctcaacggtcgagtcaccttttccgtggacacgcccaagaaccaattctccctgaggctgagctctgtgaccgccgcagacacggctgtatattactgtgcgagacacccactctactattgtagtggtggtcgctgctactccgggaactttgacttttggggccagggaaccctggtcaccgtctcgagtggaggcggcggttcaggcggaggtggctctggcggtggcggaagtgcacaggctgtgctgactcagccgtcctcagcgtctgggacccccggtcagagggtcaccatttcttgttctggaacgacccccaatattggaagtaattttgtctactggtatcaacaactcccagggacggcccccaaactcctcatctacaggaatgagcagcgcccttcaggggtccctgtccgattctctggctccaagtctggcacatcagcctccctggccatcagtgacctccggtccgaggatgaggctgactattactgtgcagcgtgggatgacagcctgagtggtgtggtcttcggcggggggaccaagctgaccgtcctaggtgacgtacgcgagcccaaatcttctgacaaaactcacacatgcccaccgtgcccagcacctgaactcctgggtggaccgtcagtcttcctcttccccccaaaacccaaggacaccctcatgatctcccggacccctgaggtcacatgcgtggtggtggacgtgagccacgaagaccctgaggtcaagttcaactggtacgtggacggcgtggaggtgcataatgccaagacaaagccgcgggaggagcagtacaacagcacgtaccgtgtggtcagcgtcctcaccgtcctgcaccaggactggctgaatggcaaggagtacaagtgcaaggtctccaacaaagccctcccagcccccatcgagaaaaccatctccaaagccaaagggcagccccgagaaccacaggtgtacaccctgcccccatcccgggatgagctgaccaagaaccaggtcagcctgacctgcctggtcaaaggcttctatccaagcgacatcgccgtggagtgggagagcaatgggcagccggagaacaactacaagaccacgcctcccgtgctggactccgacggctccttcttcctctacagcaagctcaccgtggacaagagcaggtggcagcaggggaacgtcttctcatgctccgtgatgcatgaggctctgcacaaccactacacgcagaagagcctctccctgtctccgggtaaatga

SEQ ID NO: 664 - protein, 510 aa, Artificial Sequence
  source: /note="Description of Artificial Sequence: Synthetic polypeptide"
MEAPAQLLFLLLLWLPDTTGQVQLQESGPGLVKPSETLSLTCTVSGGSITSDLSYWGWLRQPPGKGLEWIASGGDGESTYYNPSLNGRVTFSVDTPKNQFSLRLSSVTAADTAVYYCARHPLYYCSGGRCYSGNFDFWGQGTLVTVSSGGGGSGGGGSGGGGSAQAVLTQPSSASGTPGQRVTISCSGTTPNIGSNFVYWYQQLPGTAPKLLIYRNEQRPSGVPVRFSGSKSGTSASLAISDLRSEDEADYYCAAWDDSLSGVVFGGGTKLTVLGDVREPKSSDKTHTCPPCPAPELLGGPSVFLFPPKPKDTLMISRTPEVTCVVVDVSHEDPEVKFNWYVDGVEVHNAKTKPREEQYNSTYRVVSVLTVLHQDWLNGKEYKCKVSNKALPAPIEKTISKAKGQPREPQVYTLPPSRDELTKNQVSLTCLVKGFYPSDIAVEWESNGQPENNYKTTPPVLDSDGSFFLYSKLTVDKSRWQQGNVFSCSVMHEALHNHYTQKSLSLSPGK

SEQ ID NO: 665 - DNA, 1503 bp, Artificial Sequence
  source: /note="Description of Artificial Sequence: Synthetic polynucleotide"
atggaagcaccagcgcagcttctcttcctcctgctactctggctcccagataccaccggtgaggtgcagctgttggagtctgggggaggcttggtacagcctggggggtccctgagactctcctgtgcagcctctggattcacctttagcagctatgccatgagctgggtccgccaggctccagggaaggggctggagtgggtctcagctattagtggtagtggtggtagcacatactacgcagactccgtgaggggccggttcaccatctccagagacaattccaagaacacgctgtatctgcaaatgaacagcctgagagccgaggacacggccgtgtattactgtgcaacttcgttgggttacggtgactttgactactgggggcgagggaccacggttaccgtctcgagtggaggcggcggttcaggcggaggtggctctggcggtggcggaagtgcacaggctgtgctgactcagccgtcctcagcgtctggggcccccgggcacagggtcatcatctcttgttctggaagcagctccaacatcggaagttattatgtaagctggtaccagcagctcccaggagcggcccccaaactcctcatctatcgtaatgatgagcggccctcaggggtccctgcccgattctctggctccacgtctggcacctcagcctccctggccatcagtgggctccactctgaggatgaggctgattattattgtgcagcatgggatgacagcctgaatggtccggttttcggcggagggaccaaggtcaccgtcctaggtgacgtacgcgagcccaaatcttctgacaaaactcacacatgcccaccgtgcccagcacctgaactcctgggtggaccgtcagtcttcctcttccccccaaaacccaaggacaccctcatgatctcccggacccctgaggtcacatgcgtggtggtggacgtgagccacgaagaccctgaggtcaagttcaactggtacgtggacggcgtggaggtgcataatgccaagacaaagccgcgggaggagcagtacaacagcacgtaccgtgtggtcagcgtcctcaccgtcctgcaccaggactggctgaatggcaaggagtacaagtgcaaggtctccaacaaagccctcccagcccccatcgagaaaaccatctccaaagccaaagggcagccccgagaaccacaggtgtacaccctgcccccatcccgggatgagctgaccaagaaccaggtcagcctgacctgcctggtcaaaggcttctatccaagcgacatcgccgtggagtgggagagcaatgggcagccggagaacaactacaagaccacgcctcccgtgctggactccgacggctccttcttcctctacagcaagctcaccgtggacaagagcaggtggcagcaggggaacgtcttctcatgctccgtgatgcatgaggctctgcacaaccactacacgcagaagagcctctccctgtctccgggtaaatga

SEQ ID NO: 666 - protein, 500 aa, Artificial Sequence
  source: /note="Description of Artificial Sequence: Synthetic polypeptide"
MEAPAQLLFLLLLWLPDTTGEVQLLESGGGLVQPGGSLRLSCAASGFTFSSYAMSWVRQAPGKGLEWVSAISGSGGSTYYADSVRGRFTISRDNSKNTLYLQMNSLRAEDTAVYYCATSLGYGDFDYWGRGTTVTVSSGGGGSGGGGSGGGGSAQAVLTQPSSASGAPGHRVIISCSGSSSNIGSYYVSWYQQLPGAAPKLLIYRNDERPSGVPARFSGSTSGTSASLAISGLHSEDEADYYCAAWDDSLNGPVFGGGTKVTVLGDVREPKSSDKTHTCPPCPAPELLGGPSVFLFPPKPKDTLMISRTPEVTCVVVDVSHEDPEVKFNWYVDGVEVHNAKTKPREEQYNSTYRVVSVLTVLHQDWLNGKEYKCKVSNKALPAPIEKTISKAKGQPREPQVYTLPPSRDELTKNQVSLTCLVKGFYPSDIAVEWESNGQPENNYKTTPPVLDSDGSFFLYSKLTVDKSRWQQGNVFSCSVMHEALHNHYTQKSLSLSPGK

SEQ ID NO: 667 - DNA, 1488 bp, Artificial Sequence
  source: /note="Description of Artificial Sequence: Synthetic polynucleotide"
atggaagcaccagcgcagcttctcttcctcctgctactctggctcccagataccaccggtgaggtgcagctgttggagtctgggggaggcttggtacagcctggggggtccctgagactctcctgtgcagcctctggattcacctttagcagctatgccatgagctgggtccgccaggctccagggaaggggctggagtgggtctcagctattagtggtagtggtggtagcacatactacgcagactccgtgaagggccggttcaccatctccagagacaattccaagaacacgctgtatctgcaaatgaacagcctgagagccgaggacacggccgtgtattactgtgcgagaggctttggtgactactggggccgggggacaatggtcaccgtctcgagtggaggcggcggttcaggcggaggtggctctggcggtggcggaagtgcactttcttctgagctgactcaggaccctgctgtgtctgtggccttgggacagacagtcaggatcacatgccaaggagacagcctcagaagttattatgcaagctggtaccagcagaagccaggacaggcccctgtacttgtcatctatgctaaaaacaaccgaccctcagggatcccagaccgattctctggctccgactcaggaaacacagcttccttgaccatcactggggctcaggcggaagatgaggctgactattactgtctctcccgggacagcagtggtaaccatctggtattcggcggagggaccaagctgaccgtcctaggtgacgtacgcgagcccaaatcttctgacaaaactcacacatgcccaccgtgcccagcacctgaactcctgggtggaccgtcagtcttcctcttccccccaaaacccaaggacaccctcatgatctcccggacccctgaggtcacatgcgtggtggtggacgtgagccacgaagaccctgaggtcaagttcaactggtacgtggacggcgtggaggtgcataatgccaagacaaagccgcgggaggagcagtacaacagcacgtaccgtgtggtcagcgtcctcaccgtcctgcaccaggactggctgaatggcaaggagtacaagtgcaaggtctccaacaaagccctcccagcccccatcgagaaaaccatctccaaagccaaagggcagccccgagaaccacaggtgtacaccctgcccccatcccgggatgagctgaccaagaaccaggtcagcctgacctgcctggtcaaaggcttctatccaagcgacatcgccgtggagtgggagagcaatgggcagccggagaacaactacaagaccacgcctcccgtgctggactccgacggctccttcttcctctacagcaagctcaccgtggacaagagcaggtggcagcaggggaacgtcttctcatgctccgtgatgcatgaggctctgcacaaccactacacgcagaagagcctctccccgtctccgggtaaatga

SEQ ID NO: 668 - protein, 495 aa, Artificial Sequence
  source: /note="Description of Artificial Sequence: Synthetic polypeptide"
MEAPAQLLFLLLLWLPDTTGEVQLLESGGGLVQPGGSLRLSCAASGFTFSSYAMSWVRQAPGKGLEWVSAISGSGGSTYYADSVKGRFTISRDNSKNTLYLQMNSLRAEDTAVYYCARGFGDYWGRGTMVTVSSGGGGSGGGGSGGGGSALSSELTQDPAVSVALGQTVRITCQGDSLRSYYASWYQQKPGQAPVLVIYAKNNRPSGIPDRFSGSDSGNTASLTITGAQAEDEADYYCLSRDSSGNHLVFGGGTKLTVLGDVREPKSSDKTHTCPPCPAPELLGGPSVFLFPPKPKDTLMISRTPEVTCVVVDVSHEDPEVKFNWYVDGVEVHNAKTKPREEQYNSTYRVVSVLTVLHQDWLNGKEYKCKVSNKALPAPIEKTISKAKGQPREPQVYTLPPSRDELTKNQVSLTCLVKGFYPSDIAVEWESNGQPENNYKTTPPVLDSDGSFFLYSKLTVDKSRWQQGNVFSCSVMHEALHNHYTQKSLSPSPGK

SEQ ID NO: 669 - DNA, 1494 bp, Artificial Sequence
  source: /note="Description of Artificial Sequence: Synthetic polynucleotide"
atggaagcaccagcgcagcttctcttcctcctgctactctggctcccagataccaccggtgaggtgcagctgttggagtctgggggaggcttggtacagcctggggggtccctgagactctcctgtgcagcctctggattcacctttagcagctatgccatgagctgggtccgccaggctccagggaaggggctggagtgggtctcagctattagtggtagtggtggtagcacatactacgcagactccgtgaagggccggttcaccatctccagagacaattccaagaacacgctgtatctgcaaatgaacagcctgagagccgaggacacggccgtgtattactgtgcgagaactacggcagatgcttttgatatctgggggagggggaccacggtcaccgtctcgagtggaggcggcggttcaggcggaggtggctctggcggtggcggaagtgcactttcttctgagctgactcaggaccctgctgtgtctgtggccctgggacagacagtcagcatcacatgccagggagacagcctcagaaacttttatgcaagctggtacctgcagaagccaggacaggccccaatacttgtcatctatggtaaaaacaagcggccctctgggatcccagaccgagtctctggctccagctcagaagacacagcttccttgaccatcactggggctcaggcggaagatgaggctgactattactgtaactcccgggacagcagtggtaacgtggtcttcggcggggggaccaagctgaccgtcctaggtgacgtacgcgagcccaaatcttctgacaaaactcacacatgcccaccgtgcccagcacctgaactcctgggtggaccgtcagtcttcctcttccccccaaaacccaaggacaccctcatgatctcccggacccctgaggtcacatgcgtggtggtggacgtgagccacgaagaccctgaggtcaagttcaactggtacgtggacggcgtggaggtgcataatgccaagacaaagccgcgggaggagcagtacaacagcacgtaccgtgtggtcagcgtcctcaccgtcctgcaccaggactggctgaatggcaaggagtacaagtgcaaggtctccaacaaagccctcccagcccccatcgagaaaaccatctccaaagccaaagggcagccccgagaaccacaggtgtacaccctgcccccatcccgggatgagctgaccaagaaccaggtcagcctgacctgcctggtcaaaggcttctatccaagcgacatcgccgtggagtgggagagcaatgggcagccggagaacaactacaagaccacgcctcccgtgctggactccgacggctccttcttcctctacagcaagctcaccgtggacaagagcaggtggcagcaggggaacgtcttctcatgctccgtgatgcatgaggctctgcacaaccactacacgcagaagagcctctccccgtctccgggtaaatga

SEQ ID NO: 670 - protein, 497 aa, Artificial Sequence
  source: /note="Description of Artificial Sequence: Synthetic polypeptide"
MEAPAQLLFLLLLWLPDTTGEVQLLESGGGLVQPGGSLRLSCAASGFTFSSYAMSWVRQAPGKGLEWVSAISGSGGSTYYADSVKGRFTISRDNSKNTLYLQMNSLRAEDTAVYYCARTTADAFDIWGRGTTVTVSSGGGGSGGGGSGGGGSALSSELTQDPAVSVALGQTVSITCQGDSLRNFYASWYLQKPGQAPILVIYGKNKRPSGIPDRVSGSSSEDTASLTITGAQAEDEADYYCNSRDSSGNVVFGGGTKLTVLGDVREPKSSDKTHTCPPCPAPELLGGPSVFLFPPKPKDTLMISRTPEVTCVVVDVSHEDPEVKFNWYVDGVEVHNAKTKPREEQYNSTYRVVSVLTVLHQDWLNGKEYKCKVSNKALPAPIEKTISKAKGQPREPQVYTLPPSRDELTKNQVSLTCLVKGFYPSDIAVEWESNGQPENNYKTTPPVLDSDGSFFLYSKLTVDKSRWQQGNVFSCSVMHEALHNHYTQKSLSPSPGK

SEQ ID NO: 671 - protein, 15 aa, Artificial Sequence
  source: /note="Description of Artificial Sequence: Synthetic peptide"
EQRASPLTSIISEKK

SEQ ID NO: 672 - protein, 15 aa, Artificial Sequence
  source: /note="Description of Artificial Sequence: Synthetic peptide"
PEISLSQRITASEKK

SEQ ID NO: 673 - protein, 5 aa, Artificial Sequence
  source: /note="Description of Artificial Sequence: Synthetic peptide"
GGGGS

SEQ ID NO: 674 - protein, 12 aa, Homo sapiens
EQRASPLTSIIS

SEQ ID NO: 675 - protein, 98 aa, Artificial Sequence
  source: /note="Description of Artificial Sequence: Synthetic polypeptide"
QVQLVQSGAEVKKPGASVKVSCKASGYTFTSYGISWVRQAPGQGLEWMGWISAYNGNTNYAQKLQGRVTMTTDTSTSTAYMELRSLRSDDTAVYYCAR

SEQ ID NO: 676 - protein, 98 aa, Homo sapiens
QVQLVQSGAEVKKPGASVKVSCKASGYTFTSYAMHWVRQAPGQRLEWMGWINAGNGNTKYSQKFQGRVTITRDTSASTAYMELSSLRSEDTAVYYCAR

SEQ ID NO: 677 - protein, 98 aa, Homo sapiens
EVQLLESGGGLVQPGGSLRLSCAASGFTFSSYAMSWVRQAPGKGLEWVSAISGSGGSTYYADSVKGRFTISRDNSKNTLYLQMNSLRAEDTAVYYCAK

SEQ ID NO: 678 - protein, 98 aa, Homo sapiens
QVQLVQSGAEVKKPGSSVKVSCKASGGTFSSYAISWVRQAPGQGLEWMGGIIPIFGTANYAQKFQGRVTITADESTSTAYMELSSLRSEDTAVYYCAR

SEQ ID NO: 679 - protein, 101 aa, Homo sapiens
QVQLQQSGPGLVKPSQTLSLTCAISGDSVSSNSAAWNWIRQSPSRGLEWLGRTYYRSKWYNDYAVSVKSRITINPDTSKNQFSLQLNSVTPEDTAVYYCAR

SEQ ID NO: 680 - protein, 98 aa, Homo sapiens
EVQLVQSGAEVKKPGESLKISCKGSGYSFTSYWIGWVRQMPGKGLEWMGIIYPGDSDTRYSPSFQGQVTISADKSISTAYLQWSSLKASDTAMYYCAR

SEQ ID NO: 681 - protein, 98 aa, Homo sapiens
QVQLQESGPGLVKPSGTLSLTCAVSGGSISSSNWWSWVRQPPGKGLEWIGEIYHSGSTNYNPSLKSRVTISVDKSKNQFSLKLSSVTAADTAVYYCAR

SEQ ID NO: 682 - protein, 98 aa, Homo sapiens
EVQLVESGGGLVKPGGSLRLSCAASGFTFSSYSMNWVRQAPGKGLEWVSSISSSSSYIYYADSVKGRFTISRDNAKNSLYLQMNSLRAEDTAVYYCAR

SEQ ID NO: 683 - protein, 98 aa, Homo sapiens
EVQLVESGGGLVQPGGSLRLSCAASGFTFSSYSMNWVRQAPGKGLEWVSYISSSSSTIYYADSVKGRFTISRDNAKNSLYLQMNSLRDEDTAVYYCAR

SEQ ID NO: 684 - protein, 98 aa, Homo sapiens
QVQLVESGGGVVQPGRSLRLSCAASGFTFSSYGMHWVRQAPGKGLEWVAVIWYDGSNKYYADSVKGRFTISRDNSKNTLYLQMNSLRAEDTAVYYCAR

SEQ ID NO: 685 - protein, 98 aa, Homo sapiens
QVQLVESGGGVVQPGRSLRLSCAASGFTFSSYGMHWVRQAPGKGLEWVAVISYDGSNKYYADSVKGRFTISRDNSKNTLYLQMNSLRAEDTAVYYCAK

SEQ ID NO: 686 - protein, 98 aa, Homo sapiens
QVQLVQSGAEVKKPGASVKVSCKASGYTFTGYYMHWVRQAPGQGLEWMGWINPNSGGTNYAQKFQGWVTMTRDTSISTAYMELSRLRSDDTAVYYCAR

SEQ ID NO: 687 - protein, 92 aa, Homo sapiens
DIQMTQSPSTLSASVGDRVTITCRASQSISSWLAWYQQKPGKAPKLLIYKASSLESGVPSRFSGSGSGTEFTLTISSLQPDDFATYYCQQYN

SEQ ID NO: 688 - protein, 93 aa, Homo sapiens
QSVLTQPPSASGTPGQRVTISCSGSSSNIGSNTVNWYQQLPGTAPKLLIYSNNQRPSGVPDRFSGSKSGTSASLAISGLQSEDEADYYCAAWD

SEQ ID NO: 689 - protein, 112 aa, Artificial Sequence
  source: /note="Description of Artificial Sequence: Synthetic polypeptide"
QSVLTQPPSASGTPGQRVTISCSGSSSNIGSNTVNWYQRLPGAAPQLLIYNNDQRPSGIPDRFSGSKSGTSGSLVISGLQSEDEADYYCASWDDSLNGRVFGGGTKLTVLGA

SEQ ID NO: 690 - protein, 94 aa, Homo sapiens
QTVVTQEPSFSVSPGGTVTLTCGLSSGSVSTSYYPSWYQQTPGQAPRTLIYSTNTRSSGVPDRFSGSILGNKAALTITGAQADDESDYYCVLYM

SEQ ID NO: 691 - protein, 93 aa, Homo sapiens
NFMLTQPHSVSESPGKTVTISCTRSSGSIASNYVQWYQQRPGSSPTTVIYEDNQRPSGVPDRFSGSIDSNSASLTISGLKTEDEADYYCQSYD

SEQ ID NO: 692 - protein, 91 aa, Homo sapiens
SSELTQDPAVSVALGQTVRITCQGDSLRSYYASWYQQKPGQAPVLVIYGKNNRPSGIPDRFSGSSSGNTASLTITGAQAEDEADYYCNSRD

SEQ ID NO: 693 - protein, 91 aa, Homo sapiens
SYVLTQPPSVSVAPGQTARITCGGNNIGSKSVHWYQQKPGQAPVLVVYDDSDRPSGIPERFSGSNSGNTATLTISRVEAGDEADYYCQVWD

SEQ ID NO: 694 - protein, 94 aa, Homo sapiens
QSALTQPASVSGSPGQSITISCTGTSSDVGGYNYVSWYQQHPGKAPKLMIYEVSNRPSGVSNRFSGSKSGNTASLTISGLQAEDEADYYCSSYT

SEQ ID NO: 695 - protein, 94 aa, Homo sapiens
QSALTQPPSASGSPGQSVTISCTGTSSDVGGYNYVSWYQQHPGKAPKLMIYEVSKRPSGVPDRFSGSKSGNTASLTVSGLQAEDEADYYCSSYA

SEQ ID NO: 696 - protein, 94 aa, Homo sapiens
QSVLTQPPSVSGAPGQRVTISCTGSSSNIGAGYDVHWYQQLPGTAPKLLIYGNSNRPSGVPDRFSGSKSGTSASLAITGLQAEDEADYYCQSYD

SEQ ID NO: 697 - protein, 93 aa, Homo sapiens
QSVLTQPPSVSAAPGQKVTISCSGSSSNIGNNYVSWYQQLPGTAPKLLIYDNNKRPSGIPDRFSGSKSGTSATLGITGLQTGDEADYYCGTWD

SEQ ID NO: 698 - protein, 93 aa, Homo sapiens
QSVLTQPPSASGTPGQRVTISCSGSSSNIGSNYVYWYQQLPGTAPKLLIYRNNQRPSGVPDRFSGSKSGTSASLAISGLRSEDEADYYCAAWD

SEQ ID NO: 699 - protein, 98 aa, Homo sapiens
QVQLVQSGAEVKKPGASVKVSCKVSGYTLTELSMHWVRQAPGKGLEWMGGFDPEDGETIYAQKFQGRVTMTEDTSTDTAYMELSSLRSEDTAVYYCAT

SEQ ID NO: 700 - protein, 98 aa, Homo sapiens
QVQLVQSGAEVKKPGASVKVSCKASGYTFTSYYMHWVRQAPGQGLEWMGIINPSGGSTSYAQKFQGRVTMTRDTSTSTVYMELSSLRSEDTAVYYCAR

SEQ ID NO: 701 - protein, 100 aa, Homo sapiens
EVQLVESGGGLVQPGGSLKLSCAASGFTFSGSAMHWVRQASGKGLEWVGRIRSKANSYATAYAASVKGRFTISRDDSKNTAYLQMNSLKTEDTAVYYCTR

SEQ ID NO: 702 - protein, 98 aa, Homo sapiens; identical to SEQ ID NO: 677

SEQ ID NO: 703 - protein, 98 aa, Homo sapiens; identical to SEQ ID NO: 685

SEQ ID NO: 704 - protein, 98 aa, Homo sapiens
QVQLQESGPGLVKPSETLSLTCAVSGYSISSGYYWGWIRQPPGKGLEWIGSIYHSGSTYYNPSLKSRVTISVDTSKNQFSLKLSSVTAADTAVYYCAR

SEQ ID NO: 705 - protein, 99 aa, Homo sapiens
QLQLQESGPGLVKPSETLSLTCTVSGGSISSSSYYWGWIRQPPGKGLEWIGSIYYSGSTYYNPSLKSRVTISVDTSKNQFSLKLSSVTAADTAVYYCAR

SEQ ID NO: 706 - protein, 122 aa, Artificial Sequence
  source: /note="Description of Artificial Sequence: Synthetic polypeptide"
PGAAAGVGPRTGGASETLSLTCSVSGGSISSSSSSWGWIRQPPGKGLEWIGSIYYSGETYYNPSLKRRVTISTDTSKNQLSLELASVTAADTAVYYCARQVTSYGSDYFDYWGKGTLVTVSS

SEQ ID NO: 707 - protein, 92 aa, Homo sapiens
DIQMTQSPSSVSASVGDRVTITCRASQGISSWLAWYQQKPGKAPKLLIYAASSLQSGVPSRFSGSGSGTDFTLTISSLQPEDFATYYCQQAN

SEQ ID NO: 708 - protein, 109 aa, Artificial Sequence
  source: /note="Description of Artificial Sequence: Synthetic polypeptide"
DIQMTQSPSSVSASVGDRVSITCRASQGIGSWLFWYQQKPGKAPILLMSAVSGLQSGVPSRFSGSGSGTDFTLTISSVQPEDFATYYCQQAHSFPITFGQGTRLEIKRA

SEQ ID NO: 709 - protein, 109 aa, Artificial Sequence
  source: /note="Description of Artificial Sequence: Synthetic polypeptide"
DIVMTQSPSTLSASVGDRVTITCRASQGISSWLAWYQQKPGRAPKVLIYKASTLESGVPSRFSGSGSGTDFTLTISSLQPEDFATYYCQQSYSTPWTFGQGTKLEIKRA

SEQ ID NO: 710 - protein, 109 aa, Artificial Sequence
  source: /note="Description of Artificial Sequence: Synthetic polypeptide"
DIQMTQSPSTLSASIGDRVTITCRASEGIYHWLAWYQQKPGKAPKLLTYKASSLASGAPSRFSGSGSGTDFTLTISSLQPDDFATYYCQQYSNYPLTFGGGTKLEIKRA

SEQ ID NO: 711 - protein, 92 aa, Homo sapiens
EIVMTQSPATLSVSPGERATLSCRASQSVSSNLAWYQQKPGQAPRLLIYGASTRATGIPARFSGSGSGTEFTLTISSLQSEDFAVYYCQQYN

SEQ ID NO: 712 - protein, 110 aa, Artificial Sequence
  source: /note="Description of Artificial Sequence: Synthetic polypeptide"
EIVMTQSPATLSVSPGDRATLSCRASQSVSTNVAWYQQKPGQPPRLLIYGASTRASGVPARFSGSGSGTEFTLTISSLQSEDFAVYYCQQYGDWPPITFGQGTRLEIKRA

SEQ ID NO: 713 - protein, 93 aa, Homo sapiens
EIVLTQSPGTLSLSPGERATLSCRASQSVSSSYLAWYQQKPGQAPRLLIYGASSRATGIPDRFSGSGSGTDFTLTISRLEPEDFAVYYCQQYG

SEQ ID NO: 714 - protein, 110 aa, Artificial Sequence
  source: /note="Description of Artificial Sequence: Synthetic polypeptide"
ETTLTQSPGTLSLSPGERATLSCRASQSSSSSYLAWYQQKPGQAPRLLIYAASSRATGVPDRFSGSGSGTDFTLTISRLEPEDFAVYYCQQYGSSRFTFGQGTRLEIKRA

SEQ ID NO: 715 - protein, 112 aa, Artificial Sequence
  source: /note="Description of Artificial Sequence: Synthetic polypeptide"
LPVLTQPPSASGTPGQRVTISCSGSSSNIGSKTVNWYQQLPGTTPKLLIYRNNQRPSGVPDRFSGSKSGTSASLAISGLQSEDEADYYCAAWDDSLNGLIFGGGTKVTVLGA

SEQ ID NO: 716 - protein, 113 aa, Artificial Sequence
  source: /note="Description of Artificial Sequence: Synthetic polypeptide"
QSVLTQPPSASGTPGQRVTISCSGSSSNIGRNTVNWYKQFPGTAPKLLIYSDNKRPSGIPDRFSGSKSGTSASLAISGLQSGDEADYYCAAWDDSLNGHVVFGGGTKLTVLGA

SEQ ID NO: 717 - protein, 112 aa, Artificial Sequence
  source: /note="Description of Artificial Sequence: Synthetic polypeptide"
QSVLTQPPSASGAPGQRVTISCSGTNSNIGSNNVNWYQQLPGKAPRLLIYNNNQRPSGVPDRFSGSKSGTSASLAISGLQSELEADYYCSAWDDSLHGPVFGGGTKLTVLGA

SEQ ID NO: 718 - protein, 112 aa, Artificial Sequence
  source: /note="Description of Artificial Sequence: Synthetic polypeptide"
QSVLTQPPSASGTLGQTVFISCSGSSSNIGSNSVSWYQQLPGTAPKFLIYHNNQRPSGVPERFSGSKSGTSASLAIRGLQSEDEADYYCASWEDSLNGWVFGGGTKLTVLGA

SEQ ID NO: 719 - protein, 112 aa, Artificial Sequence
  source: /note="Description of Artificial Sequence: Synthetic polypeptide"
SYELTQPPSASGTPGQRVTISCSGSSSNIGSNTVTWYQQLPGTAPQLLFHNNDQRPSGVPDRFSGSKSGTSGSLAISGLQSEDEADYYCSAWDDGLNAVIFGGGTKLTVLGA

SEQ ID NO: 720 - protein, 112 aa, Artificial Sequence
  source: /note="Description of Artificial Sequence: Synthetic polypeptide"
QAVLTQPSSASGTPGQRVTISCSGSSSNIGSNYVYWYQQLPGTAPKLLIYRNNQRPSGVPDRFSGSKSGTSASLAISGLRSEDEADYYCAAWDDSLSSPVFGGGTKVTVLGA

SEQ ID NO: 721 - protein, 112 aa, Artificial Sequence
  source: /note="Description of Artificial Sequence: Synthetic polypeptide"
QAVLTQPPSASGTPGQRVTISCSGSSSNIGSNYVYWYQQLPGTAPKVLIYRNNQRPSGVPDRFSGSKSGTSASLAISGLRSEDEADYYCASWDGSLSGPVFGGGTKLTVLGA

SEQ ID NO: 722 - protein, 112 aa, Artificial Sequence
  source: /note="Description of Artificial Sequence: Synthetic polypeptide"
QSVLTQPPSASGTPGQRVTISCSGSSSNIGSKSVYWYQQLPGAAPKLLIYRNSQRPSGVPDRFSASKSGTSASLAISGLRSEDEADYYCAAWDGSLSGHFFGTGTKLTVLGA

SEQ ID NO: 723 - protein, 112 aa, Artificial Sequence
  source: /note="Description of Artificial Sequence: Synthetic polypeptide"
QSVVTQPPSVSGAPGQKVTISCSGSSSNIGNNYVSWYQQLPGTAPKLLIYDNNKRPSGIPDRFSGSKSGTSATLGITGLQTGDEADYYCGTWDSSLSAGVFGGGTKVTVLGA

SEQ ID NO: 724 - protein, 112 aa, Artificial Sequence
  source: /note="Description of Artificial Sequence: Synthetic polypeptide"
QSVLTQPPSVSAAPGQRVTISCSGKSSNIGGNSVAWYQQLPGTAPKVLIYDNDKRPSGVPDRFSGSKSGTSATLGITGLQTGDEADYYCGSWDSSLGVGMFGGGTKVTVLGA

SEQ ID NO: 725 - protein, 113 aa, Artificial Sequence
  source: /note="Description of Artificial Sequence: Synthetic polypeptide"
QAVLTQPSSVSGAPGQRVTISCTGSSSNIGAGYDVHWYQQLPGTAPKLLIYGNSNRPSGVPDRFSGSKSGTSASLAITGLQAEDEADYYCQSYDSSLRGYVFGTGTKLTVLGA

SEQ ID NO: 726 - protein, 113 aa, Artificial Sequence
  source: /note="Description of Artificial Sequence: Synthetic polypeptide"
QSVLTQPPSVSGAPGQRVTISCTGSSSNIGAGYDVHWYQQLPGTAPKLLIYGNSKRPSGVPDRFSGSKSGTSASLALTGLQAEDEADYYCQSYDSSLSGYVFGTGTKVTVLGA

SEQ ID NO: 727 - protein, 113 aa, Artificial Sequence
  source: /note="Description of Artificial Sequence: Synthetic polypeptide"
QSVLTQPPSVSGAPGQRVTISCTGSSSNIGAGYDVHWYQQLPGAAPKLLIYGNINRPSGVPDRFSGSKSGTSASLAITGLQAEDEGDYYCQSYDRSLSAKLFGGGTKVTVLGA

SEQ ID NO: 728 - protein, 113 aa, Artificial Sequence
  source: /note="Description of Artificial Sequence: Synthetic polypeptide"
QAVLTQPSSVSGSPGQRVSISCTGSSSNIGAGYDVHWYQQLPGTAPKLLIYGNINRPSGVPDRFSGSKSGTSASLAITGLQAEDEADYYCQSYDSSLRAAVFGGGTKVTVLGA

SEQ ID NO: 729 - protein, 113 aa, Artificial Sequence
  source: /note="Description of Artificial Sequence: Synthetic polypeptide"
QAVLTQPSSVSGAPGQRVTISCTGSSSNIGAGYDVHWYQQLPGTAPKLLIYGDTNRPSGVPDRFSGSKSGTSASLAITGLQAEDEADYYCQSFDSSLSGSVFGGGTKLTVLGA

SEQ ID NO: 730 - protein, 113 aa, Artificial Sequence
  source: /note="Description of Artificial Sequence: Synthetic polypeptide"
QSVVTQPPSVSGAPGQRVTISCTGSSSNIGAGYDVHWYQQVPGTAPKLLIYGNNNRPSGVPDRFSGSKSGTSASLAITGLQPEDEVDYYCQSYDRSLSGYIFGSGTKVTVLGA

SEQ ID NO: 731 - protein, 113 aa, Artificial Sequence
  source: /note="Description of Artificial Sequence: Synthetic polypeptide"
QSVLTQPPSVSGAPGQRVAISCTGSSSNIGAGYDVHWFQQLPGTAPKLLIFGNKNRPSGVPDRFSASKSGTAASLAITGLQAEDEGDYYCQSYDSSLSGVIFGRGTKLTVLGA

SEQ ID NO: 732 - protein, 113 aa, Artificial Sequence
  source: /note="Description of Artificial Sequence: Synthetic polypeptide"
QAVLTQPSSVSGAPGQRVTISCSGSSSNIGAGYDVHWYQQLPGAAPKLLIYSNNHRPSGVPDRFSGSKSGTSASLAITGLQTEDEADYYCQSYDRSLSGRVFGGGTKLTVLGA

SEQ ID NO: 733 - protein, 111 aa, Artificial Sequence
  source: /note="Description of Artificial Sequence: Synthetic polypeptide"
QAVLTQPSSVSGAPGQRVTITCTGSSSNIGAGYDVHWYQQLPGTAPKLLIYSNSYRPSGVSDRFSGSKSGTSASLVIAGLQAEDEADYYCQSYDSSHWFFGGGTKLTVLGA

SEQ ID NO: 734 - protein, 113 aa, Artificial Sequence
  source: /note="Description of Artificial Sequence: Synthetic polypeptide"
QSVLTQPPSVSGAPGQGVTISCTGSSSNIGADFAVHWYQQLPGTAPKLLINGSSHRPSGVPDRFSGSKSGPSASLAITGLQADDEADYFCQSYDYRLNALVFGGGTKLTVLGA

SEQ ID NO: 735 - protein, 112 aa, Artificial Sequence
  source: /note="Description of Artificial Sequence: Synthetic polypeptide"
QSALTQPASVSGSPGQSITISCTGTGSDVGGYNYVSWYQQHPGKAPKLMIYEVINRPSGISNRFSGSKSGNTASLTISGLQAEDEADYYCGSYSSSSTLVFGGGTKLTVLGA

SEQ ID NO: 736 - protein, 112 aa, Artificial Sequence
  source: /note="Description of Artificial Sequence: Synthetic polypeptide"
QSALTQPASVSGSRGQSITISCTGTTGDVGGYDYVSWYQQHPGRAPKLLIYGNSNRPSGVPDRFSASKSGNTASLTISGLQAEDEADYFCSTYAPPGIIMFGGGTKLTVLGA

SEQ ID NO: 737 - protein, 110 aa, Artificial Sequence
  source: /note="Description of Artificial Sequence: Synthetic polypeptide"
QSVLTQPPSVSVAPGQAARIPCGGDNIGSKSVHWYQQRPGQAPVLVVFDDSDRPSGIPERFSGSNSGHTATLTINRVEPGDEAEYYCEVWDGGERHVVFGGGTKLTVLGA

SEQ ID NO: 738 - protein, 111 aa, Artificial Sequence
  source: /note="Description of Artificial Sequence: Synthetic polypeptide"
SSELTQDPAVSVALGQTVRVTCQGDGLRSYYASWYQQKPGQAPVLVMYGNNNRPSGIPDRFSGSSSGNTASLTITGAQAEDEAVYYCNSRDSGANHLEVFGGGTKVTVLGA

SEQ ID NO: 739 - protein, 111 aa, Artificial Sequence
  source: /note="Description of Artificial Sequence: Synthetic polypeptide"
SSELTQDPAVSVALGQTVKITCQGDSLSAYYATWYQQKPGQAPVLVIYGKNKRPSGIPDRFSGSKSGNTASLTITGAQAEDEADYYCNSRDSSGNDHYVFGTGTKLTVLGA

SEQ ID NO: 740 - protein, 109 aa, Artificial Sequence
  source: /note="Description of Artificial Sequence: Synthetic polypeptide"
SSELTQDPAASVALGQTVSITCQGDSLRNYWASWYQQKPGQAPVLVIYGKNTRPSGIPDRFSGSTSGNTASLTITGAQAEDEADYYCNSRDSGHRLLFGGGTKLTVLGA

SEQ ID NO: 741 - protein, 112 aa, Artificial Sequence
  source: /note="Description of Artificial Sequence: Synthetic polypeptide"
SSELTQDPAVSVALGQTVRITCQGDSLRNFYPSWYQQKPGQAPVLVIYGKNIRPSGIPDRFSGSGSGSTASLTITGAQAEDEADYYCNSRDSSGKHMGVVFGGGTKLTVLGA

SEQ ID NO: 742 - protein, 111 aa, Artificial Sequence
  source: /note="Description of Artificial Sequence: Synthetic polypeptide"
SSELTQDPAVSVALGQSVTITCRGASLSNYYASWYQQRPGQAPLLVVSDNNIRPSGIPDRFSGSRSGTTASLSITGAQAEDEADYYCHSRASSDTHVRVFGGGTKLTVLGA

SEQ ID NO: 743 - protein, 91 aa, Artificial Sequence
  source: /note="Description of Artificial Sequence: Synthetic peptide"
SYELTQPPSVSVSPGQTASITCSGDKLGDKYACWYQQKPGQSPVLVIYQDSKRPSGIPERFSGSNSGNTATLTISGTQAMDEADYYCQAWD

SEQ ID NO: 744 - protein, 108 aa, Artificial Sequence
  source: /note="Description of Artificial Sequence: Synthetic polypeptide"
QSVLTQPPSVSVSPGQKASITCSGERMGDKYAAWYQQKPGQSPILVIYQDTKRPSGIPERFSGSNSGNTATLTISGTQDMDEADYYCQVWDSSTGVFGGGTKVTVLGA

SEQ ID NO: 745 - protein, 108 aa, Artificial Sequence
  source: /note="Description of Artificial Sequence: Synthetic polypeptide"
QSVLTQPPSVSVSPGQTASISCSGHRLGDKYVSWYRQRPGQSPVLVIYQDEKRYSGISERFSGSNSGNVATLTITGTQAMDEADYHCQAWDSTTVVFGGGTKLTVLGA

SEQ ID NO: 746 - protein, 93 aa, Artificial Sequence
  source: /note="Description of Artificial Sequence: Synthetic peptide"
QTVVIQEPSFSVSPGGTVTLTCGLSSGSVSTSYYPTWYQQTPGQAPRTLIYSTNSRFSGVPDRFSGSILGSKAALTITGAQADDESDYYCVLY

SEQ ID NO: 747 - protein, 112 aa, Artificial Sequence
  source: /note="Description of Artificial Sequence: Synthetic polypeptide"
QTVVIQEPSFSVSPGGTVTLTCGLSSGSVSTSYYPSWYQQTPGQAPRTLIYSTNTRSSGVPDRFSGSILGNKAALTITGAQADDESDYYCVLYMGSGISVFGGGTKLTVLGA

SEQ ID NO: 748 - protein, 112 aa, Artificial Sequence
  source: /note="Description of Artificial Sequence: Synthetic polypeptide"
QTVVIQEPSFSVSPGGTVTLTCGLSSGSVSTNYYPSWYQQTPGQAPRTLIYNTNTRSSGVPDRFSGSILGNKAALTITGAQADDESDYYCVLYMGSGISVFGGGTKVTVLGA

SEQ ID NO: 749 - protein, 112 aa, Artificial Sequence
  source: /note="Description of Artificial Sequence: Synthetic polypeptide"
QAVVIQEPSFSVSPGGTVTLTCGLSSGSVSPSYYPSWYQQTPGQAPRTLIYSTNTRSSGVPDRFSGSILGNKAALTITGAQADDESDYYCVLYMGSGSWVFGGGTKLTVLGA

SEQ ID NO: 750 - protein, 112 aa, Artificial Sequence
  source: /note="Description of Artificial Sequence: Synthetic polypeptide"
QTVVIQEPSFSVSPGGTVTLTCGLTSGSVSTSHYPSWYQQTPGQAPRTLIYSTNTRSSGVPGRFSGSILGNKAALTITGAQADDESDYYCVLYMGGGISVFGGGTKVTVLGA

SEQ ID NO: 751 - protein, 112 aa, Artificial Sequence
  source: /note="Description of Artificial Sequence: Synthetic polypeptide"
QAVVIQEPSFSVSPGGTVTLTCGLSSGPVSTSYYPSWFQQTPGQAPRTLIYSTNTRSSGVPDRFSGSILGNKAALTITGAQADDESDYYCVLYVGSGISLFGGGTKVTVLGA

SEQ ID NO: 752 - protein, 112 aa, Artificial Sequence
  source: /note="Description of Artificial Sequence: Synthetic polypeptide"
QAVVIQEPSFSVSPGGTVTLTCGLSSGSVSTGYYPSWYQQTPGQAPRTLIYNTNSRSSGVPDRFSGSILGNKAALTITGAQADDESDYYCVLYMGSGISVFGGGTKLTVLGA

SEQ ID NO: 753 - protein, 112 aa, Artificial Sequence
  source: /note="Description of Artificial Sequence: Synthetic polypeptide"
QAVVIQEPSFSVSPGGTVTLTCGLSSGSVSTRYNPSWYQQTPGQAPRTLIYSTNTRSSGVPDRFSGSILGNKAALTITGAQADDESDYYCALYMGSGIWVFGGGTKLTVLGA

SEQ ID NO: 754 - protein, 112 aa, Artificial Sequence
  source: /note="Description of Artificial Sequence: Synthetic polypeptide"
QAVVIQEPSFSVSPGGTVTLTCGLSSGSVSSNYYPSWYQQTPGQTPRTLIYNTNTRSSGVPDRFSGSILGNKAALTITGAQADDESDYYCVLYMGSGIRVFGGGTKVTVLGA

SEQ ID NO: 755 - protein, 112 aa, Artificial Sequence
  source: /note="Description of Artificial Sequence: Synthetic polypeptide"
QTVVLQEPSFSVSPGGTVTLTCGLRSGSVSTTYYPSWYQQTPGQAPRTLIYSTNTRSSGVPDRFSGSIVGNKAALTITGAQADDESDYYCALYLGSGTWVFGGGTKLTVLGA

SEQ ID NO: 756 - protein, 112 aa, Artificial Sequence
  source: /note="Description of Artificial Sequence: Synthetic polypeptide"
QTVVIQEPSFSVSPGGTVTLTCGLSSGSVSNSHYPSWYQQTPGQAPRTLIYSTNTRSSGVPDRFSGSILGNKAALTITGAQADDESDFYCLLYLGSGISVFGGGTKLTVLGA

SEQ ID NO: 757 - protein, 112 aa, Artificial Sequence
  source: /note="Description of Artificial Sequence: Synthetic polypeptide"
QTVVLQEPAFSVSPGGTVTLTCGLSSGSVSTSYYPSWYQQTPGQPPRTLIYNTNTRSSGVSDRFSGSILGNKAALTITGAQAEDESDYYCVLYMGSGISVFGGGTKLTVLGA

SEQ ID NO: 758 - protein, 112 aa, Artificial Sequence
  source: /note="Description of Artificial Sequence: Synthetic polypeptide"
QTVVIQEPSFSVSPGGTVTLTCALNSGSVSTNYYPSWYQQTPGQAPRTLIHSTNTRSSGVPDRFSGSILGNNAALTITGAQAEDESDYYCALYMGSGISIFGGGTKLTVLGA

SEQ ID NO: 759 - protein, 112 aa, Artificial Sequence
  source: /note="Description of Artificial Sequence: Synthetic polypeptide"
QTVVIQEPSFSVSPGETVTLTCALSSGSVSSSYYPSWYQQTPGQAPRALIYNTNTRSSGVPDRFSGSILGNKAALTITGAQADDESNYYCALYLGSGIWVFGGGTKLTVLGA

SEQ ID NO: 760 - protein, 112 aa, Artificial Sequence
  source: /note="Description of Artificial Sequence: Synthetic polypeptide"
QAVVIQEPSLSVSPGGTVTLTCALSSGSVSTGYYPSWYQQTPGQAPRTLIYNTDTRSSGVPGRFSGSILGDKAALTITGAQADDESDYYCVLYMGSGIWVFGGGTKVTVLGA

SEQ ID NO: 761 - protein, 112 aa, Artificial Sequence
  source: /note="Description of Artificial Sequence: Synthetic polypeptide"
QAVVLQEPSISVSPGGTVTLTCGLTSDSVSTTYYPSWYQQTPGQTPRTLSYSTNTRSSGVPDRFSGSILGNKAALTIAGAQADDEADYYCALYMGSGIWVFGGGTQLTVLSA

SEQ ID NO: 762 - protein, 98 aa, Homo sapiens
QVQLVQSGSELKKPGASVKVSCKASGYTFTSYAMNWVRQAPGQGLEWMGWINTNTGNPTYAQGFTGRFVFSLDTSVSTAYLQICSLKAEDTAVYYCAR

SEQ ID NO: 763 - protein, 113 aa, Artificial Sequence
  source: /note="Description of Artificial Sequence: Synthetic polypeptide"
QSVVTQPPSASGTPGQRVTISCSGTSSNIGSNAVNWYQQLPGTAPKLLIYNNNQRPSGVPDRFSGSKSGTSASLAISGLQSEDEADYYCAAWDDSLNVYVVFGGGTKLTVLGA

SEQ ID NO: 764 - protein, 112 aa, Artificial Sequence
  source: /note="Description of Artificial Sequence: Synthetic polypeptide"
QSVLTQPPSASGTPGQTISISCSGSNSNIGTYSVSWYQQLPRAAPRLLVYANDRRPSGVPDRFSGSKSGTSASLAISGLQSEDEADYYCAVWDDRLNGFVFGTGTKLTVLGA

SEQ ID NO: 765 - protein, 112 aa, Artificial Sequence
  source: /note="Description of Artificial Sequence: Synthetic polypeptide"
QAVLTQPSSASGTPGQRVTISCSGTTPNIGSNFVYWYQQLPGTAPKLLIYRNEQRPSGVPVRFSGSKSGTSASLAISDLRSEDEADYYCAAWDDSLSGVVFGGGTKLTVLGA

SEQ ID NO: 766 - protein, 112 aa, Artificial Sequence
  source: /note="Description of Artificial Sequence: Synthetic polypeptide"
QSVVTQPPSVSAAPGQKVTISCSGSSSNIGDYYVSWYQQLPGTAPTLLIYDNDKRPSEVPDRFSGSKSGTSATLGITGLQTGDEADYYCTSWDSSLSAGVFGGGTKVTVLGA

SEQ ID NO: 767 - protein, 114 aa, Artificial Sequence
  source: /note="Description of Artificial Sequence: Synthetic polypeptide"
QAVLTQPSSVSGAPGQRVTISCTGSSSNIGAGYDVHWYQQLPGTAPKLLIYGNSNRPSGVPDRFSGSKSGTSASLAITGLQAEDEADYYCQSYDSSLSGPVVFGGGTKLTVLGA

SEQ ID NO: 768 - protein, 114 aa, Artificial Sequence
  source: /note="Description of Artificial Sequence: Synthetic polypeptide"
QSVLTQPPSVSGAPGQRVTISCSGSSSNIGTGYDVHWYQQLPGTAPKLLIYSFNKRPSGVPDRFSASKSGTSASLVITGLQAEDEADYYCQSYDNLSGPHVVFGTGTKLTVLGA

SEQ ID NO: 769 - protein, 112 aa, Artificial Sequence
  source: /note="Description of Artificial Sequence: Synthetic polypeptide"
QSVLTQPPSVSGAPGQRVTISCIGTHSNIGAGYAVNWYQQLPGTAPKLLIYGNNNRPSGVPDRFSGSKSGTSASLAINGLQADDESDYYCQSYDASLRVLFGGGTKLTVLGA

SEQ ID NO: 770 - protein, 113 aa, Artificial Sequence
  source: /note="Description of Artificial Sequence: Synthetic polypeptide"
QAVLTQPSSVSGAPGQRVTISCTGSSSNIGADYYVNWYQQLPGKAPEIVIFNDDNRPSGVPNRFSGSKSGTSASLAITGLQAEDEADYYCQSYDSVLSAYVFGTGTKVTVLGA

SEQ ID NO: 771 - protein, 112 aa, Artificial Sequence
  source: /note="Description of Artificial Sequence: Synthetic polypeptide"
QSVLTQPASVSGSPGQSITISCTGTSSDVGGYNYVSWYQQHPGKAPKLMIYEGSERPSGVPNRFSGSKSGNTASLTISGLQAEDEADYYCSSYTTRSTRVFGGGTKLTILGA

SEQ ID NO: 772 - protein, 112 aa, Artificial Sequence
  source: /note="Description of Artificial Sequence: Synthetic polypeptide"
QSALTQPASVSGSPGQSITISCTGTSSDVGAYNYVSWYQQHPGKAPKLMIYDVTTRPSGVSNRFSGSKSGNTASLTISGLQAEDEADYYCTSYTRSSTVVFGGGTKLTVLGA

SEQ ID NO: 773 - protein, 110 aa, Artificial Sequence
  source: /note="Description of Artificial Sequence: Synthetic polypeptide"
SSELTQDPAVSVALGQTVRITCQGDSLRSYYASWYQQKPGQAPVLVIYAKNNRPSGIPDRFSGSDSGNTASLTITGAQAEDEADYYCLSRDSSGNHLVFGGGTKLTVLGA

SEQ ID NO: 774 - protein, 110 aa, Artificial Sequence
  source: /note="Description of Artificial Sequence: Synthetic polypeptide"
SSELTQDPAVSVALGQRVRVTCQGDSLRGYYASWYQQKPGQAPVLVIYGENNRPSGIPDRFSGSSSGNTASLTIIGAQAEDEADYYCNSRHSSGNYLVFGGGTKLTVLGA

SEQ ID NO: 775 - protein, 110 aa, Artificial Sequence
  source: /note="Description of Artificial Sequence: Synthetic polypeptide"
SSELTQDPAVSVALGQTVKITCQGDSLRNYYAGWYQQKPGQAPVLVIYGENKRPSGIPDRFSGSNSGNTASLTLTGAQAEDEADYYCNSRDSSSNLVVFGGGTKLTVLGA

SEQ ID NO: 776 - protein, 109 aa, Artificial Sequence
  source: /note="Description of Artificial Sequence: Synthetic polypeptide"
SSELTQDPAVSVALGQTVSITCQGDSLRNFYASWYLQKPGQAPILVIYGKNKRPSGIPDRVSGSSSEDTASLTITGAQAEDEADYYCNSRDSSGNVVFGGGTKLTVLGA

SEQ ID NO: 777 - protein, 4 aa, Artificial Sequence
  source: /note="Description of Artificial Sequence: Synthetic peptide"
SIIS

SEQ ID NO: 778 - protein, 6 aa, Artificial Sequence
  source: /note="Description of Artificial Sequence: Synthetic 6xHis tag"
HHHHHH

SEQ ID NO: 779 - protein, 5 aa, Artificial Sequence
  source: /note="Description of Artificial Sequence: Synthetic peptide"
PAEQR

SEQ ID NO: 780 - protein, 9 aa, Artificial Sequence
  source: /note="Description of Artificial Sequence: Synthetic peptide"
ASPLTSIIS

SEQ ID NO: 781 - protein, 98 aa, Homo sapiens
QVQLVESGGGVVQPGRSLRLSCAASGFTFSSYAMHWVRQAPGKGLEWVAVISTDGSNKYYADSVKGRFTISRDNSKNTLYLQMNSLRAEDTAVYYCAR

SEQ ID NO: 782 - protein, 112 aa, Artificial Sequence
  source: /note="Description of Artificial Sequence: Synthetic polypeptide"
QAVLTQPSSASGAPGHRVIISCSGSSSNIGSYYVSWYQQLPGAAPKLLIYRNDERPSGVPARFSGSTSGTSASLAISGLHSEDEADYYCAAWDDSLNGPVFGGGTKVTVLGA

SEQ ID NO: 783 - protein, 110 aa, Artificial Sequence
  source: /note="Description of Artificial Sequence: Synthetic polypeptide"
SSELTQDPALSVALGQTVRITCQGDSLGGFHASWYQEKPGQAPVFVLYGKNNRPSGIPDRFSGSTSGNTAALTITGAQAEDEADYYCSSRDRSGNHRVFGGGTKLTVLGA
